United States Patent Application Publication US 2026/0258423 A1 - sequence listing, part 63

SEQ ID NO: 301568 - DNA, 83257441 bp, Homo sapiens (residues 51,235,369-53,370,175 of 83,257,441)
  source 1..83257441: mol_type = genomic DNA
ctcaggtaatccacccacctcagcctcccaaagtgctggaattacaggtgtgacccattatgcccagctagatgaaaatattgttaacaaaattttagcaaattgaacctaacaatatataaaaagaacttagcatgaccaagtatgttccttccaggaatgtaaaactaattcaacatttgaaaatcaataaattcaccgcattaacagaccaaagaggagccatataatcaccttgaaatatgcagaaaatgcacttgacaaaaatctaacattgattcctgaaaaatattcttagcaaactaggaagacgtactatgttcatggatcagaaaaattaacattattaaaatgtcagtccttcccaaattgatttatgatttaacacaatccaatgagaatcacagcagatttttgggtaaaaatcaaaagcttgttctaaaattcatatggaactgcaaaggctctagaatagccaaagcaaatttcagaagaacaaagttaagactaaagcttcctgactccaagatatattataaagctacagtatgaagacagtagggttttagcatgaatatagacaaaaagatcaatgaaacagaataagagtccataaatagacctctatctatctatcggtctctctctatatgtatgtctatttatgggtatatatgggtctatatatagatatctatagatacatatagagtgtatatatatatctatagatttacatacctatagatatgtcaatatctatatagatatctacagaatctatatatatctatagattcacatctctacctatagatatctatatccccagtgttttgttcacactgctttgttcacactatgtaatgacactatgtttttgtttttattttttgagatgaggtctcaccctgttgcccaggctggagtgcagtggcatgatctcagctcactgcaaccttcacctcctgggttcaagcgattctcctgcctcagcctcctgagtggctaggattacaggtgtgtgccactatgcctagctaattttttatttttagtagagacagggtttcaccatgttggccaggctggtctcaaacacctggcctcaagtcatctgcccgcctcagctttccaaagtgctgggattacaggcatgagctgctgcgtctggcctatgttttttatgccactttgtgcattgctcatcaaggttagtcttgttcatcttctggccctccaagcatgtggcacagttcaatggtgtggcacaaggcccgaggcagggaggcctctgctgccctcacaggcctacctccatcacctctctctgtttgcttatatatctatagatatatacggtcaattgatttttgacaaagctgaaaaggcaatttagtggagaaaaaaaaaatagtctttgaacgaatggtgctggaagaattaagacattcatatgccaaaataccactttgatccatacctcacatcatatataaaaatcaactgaaagtagttcataggcctaaatgtaagttaacgtaagagttctataaaacttctgggaaaaatattaacaatcttgtgttaagcaagaagtttttagctatgacaaaaaaaatataacccataaaggaaaaaaaattcggccaggcacggtggctcacgtctgtaatcccagcacctgggaggccgaggcgggcggatcacctgaggtcagtagttcaagaccagtctggccaacataataaaaccctgtctctacaaaaatacaaaaattagctgggcatgatggcaggtgcctgtaatctcagctactcgggaggctgaggtggaagaatcgcttaaccccaggaggcagaggttgcagtgagccaagatcgtgccattgcactccagcctgggtgatggtgtgagactccatctcaaaaaaaaaaaaaaaaaaaagaaaaagaaaaaatttcataaactacattttgtcaaaatgaagcatttctgctctttgaaagacaatgtttaagagaataagacaagcacagactgggaaaaatatttgcaaatcacagatttgataaggggtttgtatctagaaacataaagaagtatcaaaattcaatgactgaaataacccaattcataaaaagaggcaaaagatctaaacagaaattcaaagatatacagatggcaagtaacaacatgaaaagatgctcaacatcagcggtcactgagaaaacacaaattaaaaccacaagatactgtaacacacctattagaatgactaaaatttataaaagtcctctacagtcagtgtggcaaatggaactctcatacattgtggatgagaatgtaaaatggtacaagcatgttggaaagcaggcagtttcttaaaaagttaaacaaccacctaccatccattccactcatatatatctgcgagaaatgaaggcatatacccatacaaagacataaacaccaatggtcatcatagccccaaactggaaacaatttaaatgcccatcaataagggattacacaaattgtggtacgtccatacaatgatttcattttgcttcttggtaacaaaaaggaatgaattattgatatacacagcgtggataacctaagccagacccaaaaacgtcttactgtatgactctttttacaaatgcaaactagctgtatagtgacagaaggcagatcagtaattacctggggatggggtgggggccaggagtggaaaaggggagttataaaggagcatgaggaaacttttagagatgaggattatactacctagattgtggtgaaggtttcatgagcgtacacctatgtttctgtgcagtttaattttgtcaatttttacttcaataaggctgttaaaaaaatctatagccagccaaattatcaaccaagtctaatggtagaaaatgtattttcagatatgcccctgaagccccttcgaaaaacttagctctcatgttcacttttttctcaggagatgattagaagatatgtttcattataacatcaaagtaaccaagaaagaggaagacggttgatttaggaactacatgattcagtacagcacagaggtaacgagagtttctaaagcaatgataaagggatgtctcagcgttacagctgtatagcgggtttagagaacaaccagattgtattagaaaaagaagatggatgatggctctggaaggattctaggaaaaatatgaatctttgtgtttggagcttgttgcagcagcatggggaaaaaggcaacaggcactttcaacactgactaaatgaaaaaagtgaaccaatcagtaactgcaggaaacaaagttgtatcagaaaggaaacagtacagtgactggctgggaagctgtaaatactatttatgtactatataaacactagcaatttaaacaaaacttgtgataaaagtcaatgaagtgggccgggtgtggtggctcatgcctgtaatcccagaactttgggaggctgaggtggatggatcacttaaagtcaggagttcgagaccagcctggctaacatggtaaaaccctgtctctactaaaaatacaaaaattaactgggtgtggtaatgtgcgtctgtagtcccagctactcgggaggcagaggcaggagaactgcttgaactttggaggaggaggttgcagtgagccaagatcatgccactgcactccagcttgggcgaccaagcgagtctccatctcaaaaaaaaaaaaaagtcaatgaactggataagcgtgaaaacaacatggcccctcatttcccaatgagattaaaaaaacaatttttttggatcaacttgaataaaaacagtttaggggatagacagtaaaagagcaaatgtctatttgtatcaactaatacactttttatttttcataaaacttaattcattaaatttaaattactgccctttattatatgatcatgtcctttattataagatcactttctttaaggatggttataggtttttaccataaaatacttaactttttatttataaatttataagttacaacaatacaaagaacatctagacaacctttatcttgactgaccaatgattaacattttctcccaattattcctctctacacgtatatttttccctctcaaccattaatgaatggtttatatgctttaagcccttttacctctaaatcagaagtagaagcatagctcagggttttttcaccttggcaatattactttgggccagaaaatgctttttttgtaggaggctagcctgtgcattataagatgtctagcatcatttgtggcagtaacactcgcctttatcccccagcggtgacaaccaaaaacacctttaggcattgccaaatgtcccctggaagcaaaaaacaaaaaaaacaaaaaaaaaatcccagttgagaactattgccttatccttcaatgtgcctttcctagtaataaggatattctcttacataatcataggtcagctatcatcttcaagaaatttaacattaacccaatactttcatctgatctaccatccgtcctccagtttcgtcaactgactcaacaacaccctttacaagatcttcttttcttcttcagcccagggtcatatatttcatttgtcatgtgccttagtctttaatctagagggagaccttatctttttttatatttgatgtcttttaagaatgcggtccctttaagactttttaccctttttctataaatctataactgttctcaaaagtctttttttcttaaagactttattttttgagaagtaataaatttatggtaaaagtgaaaattcagtagagttcccatatggcccagtttcccctattaacatcttacattagtattgaacatgctacaataaatgaaatactgataggtacactgtcattaactaaagtctacattttcagttttccttcatttttactgttcttttctctgttccaagatcccacagtacatttagtcaccctaagttttcattatttaagttgtcatacagcttctcttggttgtgagaatttctcaggttttcttggtttttcatgaccttgacagttttgaggaatcttggtcagatattttgctgactgttctattggaatttgtctgatagtttcttcattatcaggctggggttatgtttttggcaggtacatggcagaggtaaagtgtcctttgtatcagagcatttcaacgatacacactaacatgacttatcaatgctgacgttgaacttgatcatctatctgattgaggtagtgtttatcaggtttctctgctgtgaagttactctgaatcctttcctaaactatactctttggaacaaagtgactatgtataccccacatttaaggaacagggagttatatactccccttcttgagagtggaatgttcatattaagtatttggaattcttctgtatagatttcctcttttaaaaaataaaaaatttccttgttttgggttttaggtgccctcaggattatacttaggttgcactgcctaattgatgctataattttcaaggcatcaaatccagaggcacgaggtccatccaccccttattggtgatgttaatttttttttttctttgagacagggtctcccaggctgcacccaggctggagtgcagtggcgtgatttcggctcactgcaacctccacctctagggttcaagcaatccttttgcttcggcctcctgaatagctaggattacacgtgtcacctcacccagctaatttttgtactttttgtagagacggagttttgccatgttgccaggctagtctcaaactcctggcctcatgtgatcctcctgccttggcctcccaaagtgctgggattacaggtgtgagctgctgcacctggctggtgttaattttaatgacctggtctagatatggtctggtttctccactgtacttttactattttctttaataagcaatctatggggagacactttaaagataatgcaaatattcagctcattaaattttcactcaagatttaggatccaatgattcttgcccagtctctcactgtgatgatttcccaaccccaacattccctgcacgttcaccagtcagcattctctaagaaacagctctcttttttctctttttatttattattggtatcaactcatggatttctatttttcaatgttgtattttttttgagatagcgtctcgctgttgcccgggctggagtgcagtggtgctatcctggctcactgcaacctccacctcccgggtttaagcaattcttctgcctcagcctcccaagtagctgggattacaggtgcctgccaccatgccaggctatttatttttttatttttagtagagacgggtttcaccatgtttgccaggctggtttcgaactcctgacttcaactgatctgcccgccttggcttcgcaaagtgctaggattacaggcatgagccaccatgcccagcctacttttcaaggttttataactcgttattgtccttaattatctgggtgatcatactgtcccagagtaggccagtgggagccccttaaagcctactcctgtgtcattctgacatgcctctatcattttctgagcatttccttactttcttgcataataagatactccaggcttatcttataaccatttctctgtcccagccctggaaccaaacatttctcctaacagccttggtatcttttagtggggaatgatataagaaataaagatctaggtattcaatgtacttattgctatttgggtatctctttgcttctgggcctttccactggacaaagtatacacacatgtatgtgacatatatatacacacatgtattttagaaaattatgagttcacacttaaatccccaactccaagccatccccacagggtttttttctcactttcccacacttcacatttgtgtctttttcaacagaatgctggctcttaacaaaacctatctactcatttgctcaacccttttagacatttaaatagttacagaagcattacagcatatcactacaaaaaaactgttggagtttagtatttctttgcagtcacttttctctagactgactactgagtataaaagttccttggattatttatttcaatgtggttgttactgatttgaaataagttagaattggtttcttttggtttttagtctcctccatcatccttattggatttatttcattttttggggggactactgggaagatcacccttcttgcaaaaataaagaaatatacaaataggtgtaactcaaatgtcatttctttccctgcctcaccacccaccctgttaagcgggtaaccaactttatcactttccggttcattcttcctgtgtacattttgaaaaagtaaacagtatatgtacagctatatatatgttttcttatttccatttccttcacaaaagtcacatactatattcctctctcctgtgtttttgtttagaaatataccctggaaatcattccatttcagtgcactgacatcttccttattcttcttgcagctgcatagtactccattgtgtatgtttattcaacaaatctctcgtttcaacatttagttttcaatgttttgcaattacaaatacgctgcagcgaacttatgtatctgtgtgtttatactgtgcatggtatacctccagggtatatttttagaaatgggattgctgtgtaggatatatgtatttgtaattttgttagatattgccaaattccactccaaagaaatgtaatcatttgcaccagcaatattgagagtgcttgtttccccagaggtgctgggaatgtattgccaagtgtctgaatttttcccaaaatgatggatgaaaaatggtatgccagtatagttgtcactgtcttttttttttttttaagctctctatttggaagtaactttgaactttcaggaaagttagaagaataatacaatgaagtcctgtgtactctactcaaacacaacaattactaatattttgccccatatttttcttctctaaacacatagattttctgaataatttgaaagttacgtatcacaaaataattcaatgtgcatttccttggaataaaaacattttcttataactggagcacagttatcagttttaggaaatctgacaatatatgatacttttccctaattcaccatccacattccaactgactcaatatctttatagcatttcctccttcaagaccaggatcacataaaaattaaaaagtcgtatctatctctttagtgtcctttaatctggaagattagttttaattttttttagatacagggtctccctatgttgcccagactggactcaaactcctggtgtcaagcgatcctcccaccacagcctcctgagtagctgggattacaggtgtacactgacgtgtttcgtttgaaattatttttgaagaatgcaagcaagccccttcccccttaacagaatgcttctcatttgaggttcatctgatgtgtctgtgtccttaggagactctggttatgtaccccataatattacatttgtcctcaggaaattgtaaccagagtcacaagattcctatctgtctctcactggtgatgttaatgttgattactttgttaaggtgtagtccagttttccactgtatactacgtatttctccttgcaaccaatcggcaacctcagggacacactttgaaatatgaccacattgtttctcactgaaatctcaccgccattcttaaatttggcatctaatgataacttgtgccaaaccaaacattaatatgatggctgcaaaacgatttcccaactccagcacttttttatcagtcagcaagaaatcctgtcataacccccttttattgacatacctacctattcattatcagtatgaattcactaacttctatttttttcccagtggtttatcattcatcactattcttattctggggctcaaaatatgccagatgtggccacaatgatgtccctgaactggttcttgtgtcctcttttttttcctgagacagtctccccttgttgccagtgcagtggcatgatctcagctcactgcaacctctgcctcccgggttcaagtgatgcttgtgcctcagccttctgagtagctgggattacaggtgtgcaccaacaagccaggctaatttttgtatttttagtagaggcagggtttcaccatattgaccaggctggtctcgaactcctggcctcaagtgatctgccccactgagcctcccaaagtgctgggattacaggcatgacccaacatgtcagacctcctgtgtccttttgacatacttccatcttttttttgaggaattccttactttcttccttatcaagatattccaggctcattttatacctatgctgctccagccctgaaatcaataatttttccaaggaactctagtccttattagcaaagaactggtattgaaagccaagatctgggcacttaatgcagttctacagagcattttttttttaatggagttctcagtctgtcgcccaggctgaagtgcagtggcatgatctcggctcactgcaacctccgcctcccaggttcaagtgattttcctgcttcagcttctcgagtagctggcactacaggcgtgtgccaccacgcccggctaattttttgtatttttagtagaggcggggtttcaccatgttagccaggatggtcttgatctcctgacctcgtgatctgctcgcctcagcctcccaaagtgctgggattacaggcatgagccactgtgcccggccctagaggatttttttgttatcttattttgtgtggttttatgtgcctactttttttcttctttagggtttttagtcttaattttcttcaaagttcttggcattgagaaatttacatttaccctttatctgtatgtatggaaaattgtgattttgcacatgaagcttttccccatacatttaaaatatctgagatagcaaaatgtatcagtattttatttcattgtaccttgattatgagtcagaaaattttttcctgaagcatggtacagaaaaattttcccgtattttttcctggtatttgtatagtttttatatttagatctaatgtgtctggactttattattatgtatagcatgaagaacagttctaatattttttccaaatggctatctagttgcgccaacatcctttatcaaaatgtccatctttatctcagtgatttaaaataccactttaagtgctaggtttccatatgtagttgtgtccatttctggatttcacactatttccctggtctgttcttgtgccaatgtcttgctttctgaatcatcaagggtttggaatgtattctgatatcttgcagagctagataccccctcaaaaatcttttaatgtttttacattcttgcatgtttatttttccaagtgcacttcaagtattagatagttcaactctataccaaaaagttatcagtctttttatattatgatctcattaaatttctaattaactttggaaaaagtgacattttgatatgtctcaaggacagtggatgtctttccatttgttcaagtctgctttgtgtcttttgggaatgttttatatagcctgcttcacataggtttttaacaacgtttttaaggaagtaaatccttaggaatttaattatagtttgagtattcctcatgcaaaatgcttgggaccagaaacatttcagattttggaatatgtgcatacgcataattagatatcttggggatgagacccaagtctaaacacgaaattcacttgtttcatatccaacttatacacatagcctgaagataattttatacagtataaaaaaaattttgtgcatcaagtaaggtttgtgtactctgaaccagcagaaagcaaaggtgtcactatctcagttgcctatgtggttatctgtggtgtcatgtccatgctcaaagagtttcaaattttggagcattttggacttcaggtttttggattagggatgctcaatctatgttttgttgttgctattgtaatcttctcttttgttgtattttcttaactggttattttctcactacacaaaggtttattattttatatcctacctcgctgaattgtttgaaggtagttttgtcactgatttttctaaggctttccagataaacaatcacgtcactaacaaacaatcttttcttctttttccactgttatgtctctaatttgttttttgagacagggtctcactctgtcgtccaggctggagtgctgtggtgcaatctcggctcactgcaacctccgcctccagggttcaagcaattctcccaccttagcctcctgagtagctgggactacaggcacgtatcaccacacccagataatttttttttttattcttagtagagacggggtttcaccatgttggccaggctggtcttgaactcctgacctcaggtgatccgcccgcctcagcctcccaaagtgctgggattacaggtgtgagtcactgcacctggccatttgttttcttttctatctgtattgactcatatttccagtataatattaagtcatggagaaaatgggcatccttactctattcttgattgtggtgtttcttaataagattctggctttagggttaaggctatgtacatgtgcatatgtgtgtattcataaaaataaaaatattgtatgttaaggaagtattcatccattcctattttctgaaaagtttttgttaggaacaggtgttgaattttgtcataggctttttcggcttctataaagagaacacaacttttctcttctgaccgattagtatggtgaactacataaatagatttccaaatactgaatcatccttgtattcctggtataaaactcactcatcaaaatgtatttttgtaatatagtgtgagagactgcacagtaatagtttttcattagtatctgtatgtgataactctgtaattttcattttttgagctatcttgatcaggctaagaaatcagtattacttttttttttttttttttttttggagacacggtcttgctctatcgttcagcctggagtgcagcagcacgatcttggctccctgcagcctcaacaccccttgggctcaagtgatcctcccaccccagcctcccaagtagctgggactataggcacaggccactgtgctcagctaattttttagttgtttgtagagatcaagtctcactacaattgcccaggccaatctcaaactcctggggtcaagtgatcctcctaccttggcctcccaaaatgctgggattacaggcgtgagccactgcacacagtccagtattactcttacgtcacaaaaataattagctttccattttctatactcatgtagcatcgggagtatctggtcaggcagaattcccctgtgaaaccatctaggcctggtgtttggtgggatggttccttgacaaatttttagttcttctaggaaaattggtcttattttcttttaatctctaatgaggtcaattttattaaactgtattctcctaagaaattatccatttcatctaggttttgaaatgtatttgtacagaggtgtgcaaaatagttctgtattaaaatagttctcaatttcctctgtatccaatgttattttcccgttgttatttcttaaaatttcatgtgtgctttctccctttccccacttggttaaattagctagtgattcatctattatgtgactcttccctcaagggtccaagattggttcatcaactagacgtatagttcttctgttaactcattaacttctacttttatctttatttccttccttgtgcttttggcttactttgttcatttctgaattgggaatttattttcatttatgtaagtgtttagggctatgaattttcctctgctcactgctttaaatgtattccacagattctggtatgtagtattatgtagtacttttcttatcatcattttccagaaactttgcaatttgtgtttcccttttacccattaaacttttaaaaattaaggcatactgttgaacacttatcaaaatataggacttttctgtcactctagaaagctccttcctgtcctttcccactcaatctctccccagtcctgagttctattagctttggctaaattttgtatatatttaagattttatataaatggcataaaatcgtatgcatatttttgtgtctaatttcttccagtcagcatagtgtttctgagattcattcatgttacatgtataaatggtttctttttattgctgagtaatactcgtcaatgtatcagcttaccctttcttcatccagattttactatgaataaagctgccacgaaaattcttgtacaaggttttctgtgaatacataatacaaggtttcttaacttcaagacggaagtgcaatgtccttttgctttttgaatttgtttttgttttcttgtatgggacctactaatgtttttctaatagattgacaattttttgtgaatattctgtgtttaaaaagaacatactctctggccccgcatggtggctcacacctataatcccagcactatgggaggccaaggcaggaagactgcttgagcccaagagtttgagactagcctgggcaacatggcgagacttcgtctctacaataagcaaaaaaaaaaaaaaaattagctgggcatggtggtgtgcacctgtggtctcagctacttgggaggctgaggtgggaggatcacctgaggcagggaggtcaaggctgcagtgagccgtgatcatgccactgtactgcagcctgggagacagagttgggggtggggggaagcagtatattcttgattattagggatatacttgaagattcacattatattatttagatcttttatatccttttttacccactacatcttgtgctaagtgtcaaagtcccctaattttagttttttatttcttcttatacttcatatagattttgctttatacagattgttgctgtgttatgtggtacatatttaactgtgaattctttgttgtgaatcatggtttttagcattataaactgttctcttttgtctgatttaatgctttttttggtttgaattctactttgctatcagcattttcagtcttgtattcttggggtttctatttgcctggtacatatttgtcctggcctttatgtttgctctcaattctccacatattttatcattagggtatgcattatgtactgtatacttttttttctgttccatcatggttttctttgtccctttaaaaatttctctcagtattttggaaagtcttcgtcacgcttacctttatattaatagcttttacagtacactgtattttttttcttacctaatcttttctatttggtctttcagttttagatggtagcctctgactccctcatattacttcaattacagtaattattcttattctagttctgaaaaagaacagttctagacagggtctcattctgttgcccaggctggagtgcagttaggcaaacacagctctctgcagccttgacctcctgggctcaaatgatcctcctacttcagcctcctgagtagttgggactacaggcatgagccaccatgcctggctaattaaacacttttttttttttttttgtagagactgggtctcactatgttgcccaggctggtctagaagtcctgggctcaagtaatccacccacctaagcctcccaaagtgctgggattacaggtgtgagccaccacacatggccttagtttttccttttattttccatcccattatattttagttgcattctttctgctttgtcagaatgtataatgtttatgtactattctctaggtccctactattggttttaatcttagttcaaaaagatatctgaaatacttattgtcacagtctttttgtaggaaatgtcccaaatatcttttagatgaaagtcatccttttcgagtgtcctcaggaggggtaaacgagtacagtattccctgagttcctgcatgttcaaactgttgttctgcagccctaatacctggacaacagttagctggatataaaatccttggctagcagtcactttcctcatgctgctccactgtcttgctttgttatgttgcttttgagaaatctgacactggtctaattctcttgcctctatgtcacgtctttgcctggagaccctgagaattctttgcatctttacagtcatacagctttactaggaaatatctttgagtgtgccttctggtatgaacttctgtggtatagattcagatctcttttcacttccagaaagttttcttggattatagttttaaatattttctcttcttgaaggacaccaattatatacagtagactttggatccatctcccatttcaacttggtcaattttcaaaacaaaaatctcatctcaattatcctgttttcctgcttttcttcaagactttttattaaatttgaatttgaaatgtgggaatgttaaaacttcattattggttatgattttatcttctatttttctgtttaatctactttgtgttcatttcttaatgctttttgttctttgtatttgtttcagaatatttcttaattttatttttcaaatctccaaacattggtttgaggatgtttaatttcacttggagcattgtgtcaattttttcctgctttttttgatgggggtagattttcatcagttgaaatgctgattcacatttcctgtttgttttttcttacagttctgtatggatgtggcctgctcttttctatttctgttcatttcataggcagagctcctacttcaagaacaccctcttctctaagttcagtttttttcttttcctgaagaattttttcttctttcttcttcttcactgccatgtttccaagtcttcactgacatgtctccaagtcttcatgtttcccttatgaggcaatgcttataatttaaagctaccaattctggtactgcttacctttaagctcttctccatacatagagctgtgaactatcaaactccaaacctatgatcaatgttttggagcttttttcagattttctctttctgagagtggatctttgtaccttgtctaaagctttcacactcccatacctctttcagtaaatttgtcaagccttccctctctcactcttaacacctagaggaatgatcataaggagcagttggaatttggtttatttctctacctataagaatctacaaatctctatttataggcagagaaataaactaaatttgtgagttgaactcttaaacacatttcgtcctataggagtttatttgtaaattctacaataacctaatattggacttgctctgtcattcaagctgcagtgcagtggcatgatcttggcttattgtaacctctgcctcccaggttcaagcgattctcatgcctcagtctcccgagaagctgggattacagtgtgtgccacaacacctgggtaatttttgtatttttggtagagacagggtttcgccatgttggccaggctgatctcgaactcctggcctcaagtgattggcccacttcggcctcccaaagtgttgggattacaggcatgagccactgcacccaaccatgttggactatttttgttactgatctgatttggttattattataatatttgtaatatgcttagtatgtgtcaggcatattcagcacttaaatctgtagcagcgcatttaaaccttatgagtgtcactctcattttacaggaggaagcagtggcccaaataggctaagcaacttgcccaagatcatataaccaccatgaacactaataatatgaatcatgggactatcttaaaacgttttaaattttaaccttctttctcccccctccccaatactggttctgtcagctagcctctgtaagcatacaaaacaagcatcaaataaatatgtttcaggtaacgtgccttcatgaacattttgctcttcaaaataaaaccgaggccaggtgcagtggctcacacctgtaatcctagcactttgggagaccaagggtgggtggattacttgaggagtaatccaccaggagttccagaccagcctggccaatatggtaaaaccccatctctactaaaaatacaaaaatcagccatgtgtggtggtggcacctgtagtccagctaccagggaggctgaggcagaagaatcacttgaacccgggaggcgaaggttgcagagagccaagattgagctactgcactccagtctgggcgacagagtgagactctgtctcaaaaaaaaacaaaacaacaaaacaaaaccccaaaaaactgcaaatcatattagatgactaaggtcttgaatgtagggagatggaatgattgtaggtaggtaaaccttgctttatatttgggtgtatgttctaactccctgtccactataaagtcactaatgtctaaaattcatatactaaataaataatataagcctaagctttagaattagagagatagatactagatgagaaagctaaaagaatgaaagcagttgtctcatcagagctgaattgggacaaggaccattttttttggaatacttttagcattgtttaattattgtactatcaagtgcatgtattactttgataaaaataaaagctaatttatatgaagtatacagtacattaaaaaattaagttggtatatattgagagattgatgatatctggtatcagtaaatacatgtgggaaaaacagtgctcatatacacttggtaggaaggtaaccttacactatctttccggaaggcaatttgacattacatatgaaaacttaaaatggctatgccttttgactaggtaattccatttttaggaatctgtccttcagaaatactcatacataatacatacaaggacacaagaacctatgtagaaggatgtttgctaatgtaataataatgaaaaactggagacaaacttacaatcagcaggggaatcatgagcaacaggtaaaatactgagtggaaaaaataaatcacaatatatagtataataaaatatatcacaatatgactcactttttattcaaagagacaatatacactggcatatacacagatcaatatatgtatgtttgtttttatgtgcactaagaaagaccttaggagtagctaaacttttagcagggtagaagtggcatgggaagatgaatctaacttttcaatatttttcttttttaaaacattataggtgtacttctataataaaaaataaaaggtttttatagtgacaaaattaaagaagagatcacaaatcacaacagaacttcattgtcctactgtaactgtcacttaggtaaaccatcctccctatgaaatctacaagggaattaaaaagcatagtcattaacttattggtataaccaaacaaaagttccaacaaaactaaacatctctgggagaaatgacagaaaacacttgaaatcttaaatgcaggtgtcaataaacatggagccaagtaatattaataatagtgtaatttcaatatgagtaaactcaccagatatgaataaactcatcagaagtcaaccaattcttcattatccaaacccactgggagcagtggctcacataattttcaaatttttatatttagctatggagcaaatattttctagaatcttaaatttgaatgttgtatgcatgagatcacaaagtagtaaacagagattaatacatactctacaatgactgaacttggtaggagctcaagagctatttagctcctgcaggcctctttttcattctattatactatgaggatgaaagcacattctggtatagtgataaaactcatcagtgtaaagagaaatgccttctttctttctaagcttactgttacgaggaacataaatggtaaggatttgggattactgagtttttatttcccacaaattcaatgtgcaagcaagaataaattcatgtcaatgatacaatcaagaggaaaccaaaagcaataatattctgaataacccatctaaagaaatggaaaagtacccaggagaatgataggagaggacaatattctacatagcaatattttaagatttaaagcaacagtgaacaaaaggaagtgattctttgatctacaagaaatacaaatttctacctctttgggttcaacttctagacctatcactgttatgacttcggatgtaacaattacttgggtctcagtttccctctcttctaaataagaaaaacatcacttaccacacaggaaggatgtatgataaaataaaaaaattcacatgaataggctttcagttcttccgaagaaagctatgaatccttaagtacaaacctggaaagctaattaaaaataagatgaccatatcaaaattaagtctgaaacatgcagtggcctagagattccctgagatcattatcagctatcaattctaccccaataatagaattcatactcaagctgggtctgtagggcgaatgtggtctgaatgatcaaacaagatcatttattagtatgttaacatagagacgggccaggcgcagtggctcacgcctgtaatcccagcactttgggaggctgaggcgggcagatcacaaggtcaggagtttgacaccagcctggccaatatgatgaaaccccacctctactaaaaatacaaaaatgaactgggtgtggtggcatttgcctgtagtcccagccactcgggaggctgaggcagaagaatcacttgaacccgggaggcggagactgcagtgagccgagctcatgccactgcactccagcctgggcaacagagcaagactccatctcaaaaaaaaaaagaaaagagaaagtaaattcaacagcttattcagtatcatattgatctgatataacctaaaaacacttgatctgaaatgataacattctcttggtgtttacctttaaaaaatatatttggaactggttgctcagaagatataaaatcactgaacaatagtaactacagggtgttaataattaaacaaagatgggttaaacacatacagatacacaagggggctacttctctggtgtataaaataatctctagcaaattttaaagcttagaagtcttaaagtaatagatgatgataaccttttttttttcctttttttttttttgagacggagtctcactctgtcgcccaggctggagtccagtggcacaatcatggctcacttcaacctgggtctcccaccagactcaagcaatcctcccacctctgcccccgagtagctgggactacaggggtgtgccaccacacctaatttttgtaatttttttttgtagagacagggtttcgccatgttgcccaggctgatcttgaactcctgggttcaagcaatctgcctgtcctgggctctcaaagtattgggattacaggcgttagccaacacacctggttaatattaaccaatatttattgaacgatatatacaaatcactatgcttagcaccagaaatacaaagaagtattagacttaacattcctgtcctacaattaagactgcaaacggtggccaaataattgggccacaacgttgaacaaactaatgagtattatatacaaccagttttaaaagactagtagtaggaattaaacatagtgaaaaaggaaaaagaaggaaagcctgggaacacatcttaacattttatcttatgacttgtctcatcttttatagcagcttactttttttaaacagcgggcataacatctgagtggaggtttacagaaactacaggaggcagggctgatgttcaccctgtatttcagatgaggaaagtgaagctttcaaagaggttacacaactcacctaagatcgcagttcagagaggtagcttgctgactttgtccagagctcacttctactagactaaattctaaattatcagtgctaaagtgagaactcgaagggacctcagaaatctcctaatggagtgtttccctaaccaacctgataaactttctggggtatacattaaaaacacattcccaggacccactgcagacctactaaataagttataggagagaagtttagtattttaacaagagcctccaagaagtgattataatgattagttatgcttagaaaacagtgttctatgtgtgtatgtccagtatgccagacatttggctacttaaatttacattgcctaaaacagcaaaattaaaaattgagttcttcaatttttagttccactagttacatttcaagtgctcaacaaccacatgtggctagtggctaccgtaactggacagcaaagatataggaaatttccatcattgcagaaacttctattggattatgctgatactagactaacccttcaactgccatgagaaaatggaggcacaggatcttgtccaacaagggccatggagctactcaatggcagaattgtgacatcaacctcactgccagcacccctcttattgtatcacttcatcctatctcatattcagggtttgttcaaatgggaattatttccttttcaccttttattgtgggttccagcaaagcaagaagagaaatcctaaatttgcaggtaaaaaaatccttaagccaaggtttattaaaaaataatgattaaatctatgtgcaatttttgcctgaaatcaaaagtcatcttgcacagttaagaatactgtggtgttaggagaaatatcttagcttgttttaactattgtaagtcctttctcttttattgtcctgatgtttttattctttcttgaattttgaaaccctcagactaatgatacataagtgtgaaaggttatatcttatttagcaaacattttaaagatgaaaagctgagaaacaaagagcaacccaaagaatgtcacttgtctaattttagaatgtggttactcagactactgagcactcttggcttttagtaattcagtggtttagtatttatcctaatatgttgttttcacttttaaactatagcttatattttcctttgatcactatgttacatttgaaaacaatttaaaatgttgttttaattttcaacattattgagggaccaaaagcagcactagaacatctagaaaggtttagataataaggtcaacatataaccagctttaaagaatatggcagcgtcttaaaaataaaaccagttgttcctgtctagtatgtttagaatgcagatgtctccaaagtcagtcaacttaagtcatgacagttcatgtttaaagtaagcaggaaaaaaacttggaactccttattaattaaaatgttaaaaacactattattacacctctactgattctttttcacaagctgaattctaatgagtagatttagaggaaatattttatgtcaaacattacataaagttagaaactggatggttaaaaagcatgacgcaacaacgtaaggcactatgaataaatacttattcaagacagatgttgccataatttgcaaggtactcacaagcaatcagtatggggttttagatagatagaagctacttgttattcagagaaggaggtggtgcaaaaaaaaaaaaaaagtacagctattttctttctaaacactctggtgttgaggtaaacaaatgaaaaataaaataacagtctaagtccacaagagcaaagcaacagtctctaagttataagaggaggagagaaaaattgagtctaaccttttaaataggagactggggcttaaggtgaaatttatttgctggcttttaaatcacatgcattatttctacattatacctgttatgtcttgacacccacttcaccacattagagagtaataggtatatccaagattcttaggccaataaaactacttttagaggcagcatagctcaccaaatgaaggagaatgttagaaaaacacccagtgacaatagtttcaactatctcaaccacccagtgataagtactggtgcatgctaatataaggagaattaaaaatattgtaaactctaaacaagtattaaaatggttcgtaaatttcaaatctcataaaagatagttacttaaaaaaaaaaaagaaggagtaaaagcatttggaagagaggcccttggaggaaagactagcttccgaggaacacaggtcaaatacgggtgtgggcggtaatcatctaatcatccctctaccaggtgatgcttctaaccacttcagttttagacatccttagaagtgatttaggtaataaacaaatgtgttttgtgatacaagaaccacggagatgacgctgaaatttctaacttcaaaaagatgcactcctaagagaaaacaggcacgaaattcccatattgtaattctttagcttcctgtagaaaaacatcttcaggcatgtaagccagcacacttgacactgacccagcaaagttttcggctagccctcactatctctcaaccccccttcctccacttccctgctgttctttcttggcacacaaaatataggccaatgagcagtgggtgggtgaggaggatgtgagagaaaatttgagaagtaaaaaaaggagcaacttaaccaggacatgaatgagactgaagggtctaataagggtaggcagacaacaattagaactactgaaatatgggctttcctgggcagtagtgagctctcagtgcttttaggggtgtaagcagggttcagactacctaccacttgtcagagaggctgcagaggggacggctgctttggatgacctctaatgtctcttccgactctgaaatgttaggattcttatttcacaaaggagaacgcaatggtcacagaagtccaccgacttgaaacccttttaaatatgcagccttggaggctgcttcccaaacaccactcccacctctcccgcacgtgcccaccccgccccctttcaatatttccacctccacgtgcaaaccgcctcgcggcactgcccccaaggcagatagacaccttcccctgcaaagcaacgaaactgtgctccccctccccgccaagaagagaggactactccactctcccaccctgggtggctaaaaaaggaaaagtctcggatccagcctttcccccctagccagagcagggggcgggggcaggacgcagagaaaaactttcttctcgaatttttcttccaaagggtggaggagatggagagaaccccaacgagtccaaggctgacggggtggggggaggggaacccctgaatcgtttaacggctggaagggggaggggggctccggaggttgagagggcgtgggatggagaagcaggccagggagcggggtcagggagctgcggggttcctggggtcggagagctgcaggcgtcccccccacctggcacacaaagcggctgccgcgctcggctctcaccagatcctttgtgttttccatcagggcctcatgggtaggggttgtccgtgctccccgagcccgcggcgccccctccccgggctgggggcaggtgcctctccccgggactgcggcgactacagggggcccccggctgggcccagaccggtggcgggtgcagcagcccccggatttcccccctttaactcgggtggccccaggatatcaacaacattagcatagccctccctccccagcgcgcctgcgccgtgacccgcgccccgattggcccacttccctacataccctcctctctcgcttccaccgtgggaccctctgcaggctccgtactccaaggaccgtaccaagacgaagggtggaaagcgtattggggcttgtgtcaagtcaagtggttacagccaagaggaaaagcagaagttccattcagccgtcccagtgtatagtcggggtttcttgcgctcctttcaatatgttgcagctgcgaaattgtgttggaaaaattttccactccagtcacgccgcttccccctacacccggaagattggccctcccggaggaactcccacacggggcggggctgggtaggggagcgggagttacgtagagggagggagtgctggtcacgtggcaagaggctgcgcaggctccttccggcccccggggcttcggcggcggcggcccgcgaggggcctgggcgcatgcgcagcgaggttccacgtgagcgcctgcgtttctcctcaaacctaacgatgccgccggagcggaggagacgaatgaaactggaccggagaaccggagcgaagccgaagcggaagcccggaatgaggccggactggaaagccggagcggggccaggcgggcctccccaaaagcctgccccttcatcccagcggaaaccgccggcccggccgagcgcggcggccgctgcgattgcagtcgcggcggcggaggaagagagacggctccggcagcggaaccgcctgaggctggaggaggacaaaccggccgtggagcggtgcttggaggagctggtcttcggcgacgtcgagaacgacgaggacgcgttgctgcggcgtctgcgaggcccgagggtgagggaggccgcggcgcgcgggctgggcgcactcgggcggggcgcgcggtgggcggtgaagctccggggggcggagcctgggcgacctgcggcggcggggagcgctcaggtgggagggagcccgagaacgcgggcgcggagggtcgcagctgcgggtccctcgcctccctgctccagactgaaagtgcctggagggcggggaccgcgtctttctccgcccctggaggcgccgctgctcgggtatctgctttgcgaactgtggtcgtgagcatctttcgctgctgctcgactccgctagcctcttcccaaactgagggtggtcttttgatcacctgcctcagttccttgtgattcaggaattcgatttcgttgatggaatcaattcgtgggcacgggcctgggcatctccgttgtaactatgtccccatgtgactatgagacccaccatgttttgagaatgatcgtgtattccgttcatttagcaaatattggtgaacctgttagttgccagataccctttctggcaatggcaaaccctgcgtgattgatcatactttttgcacacattttgctatccctttaaattctataccaggcttttcttgagagagtcccggacattgttctaggcactggaggagacacagcaatggacaaaactgacaaaaatccctgccttttggcgcttgtgtgctagtggcagagacaagatagaggagataaacgagtaaacttcaggtttgttggtgacaagtgctgaagagaaaaaaggacattcgggaaagggagatgggcgtgtgtagaggcctgtgaaattttagataaagggggcagaggaaagctcaccgagaattacccaggccatgtttattacacaaatgctgacctagttaatgtcagctgcttaccagagccgccttcgggtgcttgtaggagaagtggcagcaatctttttgggaagtacagaactattactggaaacatgctgaactgtgcgacggttttgtcgtctggaaaaggaacagtgtacggaggtgggagctgttgggtttgaaggctattagactagtagtagagcaagtagaaaccacttggacatttctatcattggttttgggaagctcaaactcacttcaagggatattctgtggtctaggtttagatttttttttttttttagactcgccctgtcgcccaggctggagtgcagtggcgccatctcggctcactgcaacctccacttcctgggttcaagcgattctcctgcctcagcctctggagtagctggcattacaggcgtgcgccaccacgcctggctaatttttttttgtatctttagtagaaacggggtttcaccatcttcgccaggctggtctcaaactcctgacctcgtgatccgcccgcctcggcctcccaaagtgctgagactacaagtgtgagccaccgcacccggcctaggtttagatttgatagtataaactttatggtataaatttataactttagaatttagatttaatggtatatttattttttacttatttagagatacggtctaactttgtcacccagactggagtgtagcggcacctattagtcttccatctcccttttgctaatagtaactggttgctcttcttgttggtcacagataaattacacctgcacaattctccgaacactttaaactcagaagtcagcttcatcctcctaggctcaagtgatcctcctgcctctgcctcccaagtagttagctggggccacaggtgcacaccacacacccagctaaatttaaaaattttctgtagagacgagatctccctatgttgcccaggctggactcgaactcctgggcccaagcagtcctcccaccttgacctcccaaagtgttgggattacaggcatgaggcattgcgctctctgctggtataaagtttcttaaggaggtagggggtcaaaaacagattgggaaaatggagatatctttgactctagtttgcctccggtcctgtaatttctgtagttctgacatttctcctccttttttcatctgcagactcatcttttgttcttgtcttacttggtgttttccttcctgcgtgttgagtgttgactttttctccttgactgttccatcttgcctcacctgtccagtcggtgccattctctgatttctccattttctgcctctgcttccagcatttgcaatggtagcattccatcccattatttcatcagagagtggtagaaaaaacattctatgagccatttggctgtaaggcctatgtgtctgcagtcatgggataggaaaatctcagtgcttgagggtgttttgtctgctgtaggttcaagaacatgaagactcgggtgactcagaagtggagaatgaagcaaaaggtaattttccacctcaaaagaagccagtttgggtggatgaagaagatgaagatgaggaaatgtaagttgcctaacttttcttctgaatccctctgtacacttaaaaaagttattttgcagattttaaaatcattctttttaccaatttgtgattatgtgaagatttgaaaaatatttgaaagtatagaaaagatctttcatggttcctgatcccaccaccgagggagaactgctgttagcatgttgtcacacttctgtctcagtctcctctttgctgtatacagtagctaagagaatacagtgtttgaagtcagatctcgatttgcctcctcttttggccagtttctaattgaccatgggcagtttggaacctacattttttcctttgtgaaatgggcacaatgatagtaactacatcagaattttgttgggattaaacaaaatagtacttgtagaacttttagcacagtgcctgaaactgagtaaaggctaaaaagaaggtagctcacaccataggaactgtcatggatgagaatgtactgtatgcttgatttaacattttgactttttctacataaagttactttgtaaacatttctccctacttaaaaaaaatagacattttaaaatggctatgttggagtcaattatgtgaattaaccataatttacgtggctattgttgggtagattttctttttccctttttttttttttaattattttttttgaaacagagtcttgctgtttcacctaggctggagtgcagtggtgcgatcttggttcactgcaacctctgcctcctgggttcaagcgattctcctgcctcagcctcccgagtagctgtgactacaggcgtgtgccaccacacctggctaatttttgtatttttagtagagacagagttagacggagttttgctacgttggccaggctggtcttgaactcctgacctcaagtatacacccgtctctgcctcccaaagtgctgagattacaggcgtgaactgctgtgcccagccttatttttccctttaatgcagattatttcagcattaatgtttatcacctctttatgtataaacctttctttattttctaatttattgccttaagaaagattctttgaggtagaattacttaatcaaagagcacagttatttttaaggttcttgataagtactgccagactgcatgctatggggctctaccagtttgccttcccattgaaaggtgtcagtttcagtccattcttagacacaatggtttatttgttttttttttccagactctgtcagtttggtagtgggtaatatctctacctagtttgttttgaggaagtgtttttgtgtttagtcattgtcttcttttttttttttttgagactctcatcctttcatccaggctggagttcagtggcgcgatcttggctcactgcaacctccgcctcccaggttcaagcgattctcctgcttcagcctcccaagtagctgggactacaggcacatgtcaccatgcccagctaatttttgtatttttagtagagacggggttttaccatgttggccaggctggtctcgaactgttgacctcaagtgacctgtttgcctcggcctcctaaagtgctggggttacagacatgagcaaccacacctggcctcgtttcttataaatattctttattatgtccttgtctattggagactttttaaataatcttggtatattagttcctgacatattgagaatttcaaacctttatatgttagatttattgtaggttttccccagctttctgtgcatagaagttttgaatttttatatagtcaaatctgtgaatcttttccttcattatttttactgcttttttaatagtaagtagttaacagagagagacaaatgtttatctatatttttacttcatagtattttaaggtttgctcttttttttttttttgagatggagttttgctcttcttgcctgggctagagtgtagtggtgcgatcttggctcactgcagcttctgcttcccaggttcaagtgattcacctgcctcagcctcctgagtagatgggattacaggctcctgccaccacgctggactaattttgtgtttttagtagaggcagggttccaccacgttggccaggctggtctcgagctcccgaccttcagtgatccgcctgtgtctgcctcccaaagtgctgggattgcaggcatgagccaccgtgcccggcctttttttttttttttttttttgagacagtctcactcttttgcccaggctggagtacagtgccacaatctgggctcatttcaacctctgcctcctgggttcaagtggttcttctgcctcagcctcctgagtagctgggattacaggtgtgtgccaccccgcccagctaatttctgtatttttagtagagatggtgtttcaccacgttggccaagatggtctggatctcttgacctcgtgatccacctgcctcagcctctcaaagtgctgggattacaggcgtgagccaccacgctgggcctaaggtttgctctttatgtatttaactctttgatttacttggggtttattttggagaatttcataaactgtgtgcagataagtcatgatgaattttctcaaatagtagctctccaaagtgtaaaccagatgatctgaaatgttggcaactacttttttgttcttttaggaagaacagagaagatgcatttgaaatgttcacatcttaaaaatcttgacctatattgtttcattaaacatttttctccaagtgctaaaagcagcagctatttatattaactctttaaaagttatttaaaatatgctgttctgtttttgtagggttgacatgatgaacaatcggtttcggaaggatatgatgaaaaatgctagtgaaagtaaactttcgaaagacaaccttaaaaagagacttaaagaagagtaagtgtcttttttcatatgatttaccaagaggtgtatgtaaccaatgcccagtcattaaccgtaaccgcttcttgtgtagttttccattttgaaacagtaagaggattgctattgtgggcagtgactaaatttctgtagttttttttaggggagaggggacaaaacacagacacaaagaaaatttggaaaaaaattcttaccactcaaatataatcagtgataatattgcttacttgttcatttgcatatggtacaccataattttataatatgaacattttcaaaaatttaaatggccaccacctgggttcaatggtttttaacattttgtcatatttgctttgtgtatttgggggatgtgtgtgctttcccaatgtatttgagagtaaggtacagataatgcgacacttaactcattaatttgtcaatgtgcatctcttaagattaaggatgttttccttcatattcacaataccattgtcatacctaagaaaattaacagtttacggctagtccatgttagtttctccaattgttgtaaggtgcatacattttatttggattttatgtcctttaaatttatatatttttttgaggtaggatctcactctgtcacccaggctgaaatggagtggtgctgtcatggctcattgcaacctctatctcctgggctccccatagctgggactacaggcatgtaccaccttaatttttaaaatttttttgtaggaatggggtttcactatgttgctcaggctggtcttgagctcctggactcaagaaatcctcccacctcagcctcccgagtagctgggactgcaggtgtgtgccaccatgcccagctaatttttgtatttttttgtagagatgaggtttttcgccatgtcgcccaggctggtcttgaactgggctcaagcgatctgcccttcttggcctcgcaaagtgctgggaatacagaggtgagccactgtgctcagccattacctatcttttaagtgttcagacctgttgtcttgtagaatatcccacattctgacattttaagactcctgttttttattgaggtgaaattcacataacagtgttaggcattttaaagtgtaaatttggtggcatttagtatatttagaatgttgtgccaccacctcttcaatctagttctaaaactttttttttggtttttttttttttggttcttaaacatttttatcacctcaaaagaaaactctccattaattagtcactttgcatttcctcttccctcaatctgattattttttctttgtgttgtttaacttgttctgtcatctgtatttcctgttaagttgggcttaaagtcttgattagaattcaattacgtattttggtgaggagtatcttaagatgatgtgtaccagacactgcccctcaaagtccagttgtatcagtctctttcaagtctgatctttttctcagctttgtgtcagggtcttataaatgcctttaggggaaaatttgtggtggtgatggggttcatcttgcttatatcccttctctgagggatcacagtcctatgctgtcatccagtttccgaaaaaatttgtttcatatattttgtccaggtttctagttgtttatggctcgtgggcttagtttggtgagctagtctgtacttctgcatcaaaaaattaaaacaactctctttgccctcttccaggtaccagttgttgtttttttgttttttgttttttgtttttttttttttgagatggagcctggctctgtcgcccaggctggagtgcagcggcgtgatcgcggctcactgcaagctctgcctcccgggttcacaccattctcctgccttagcctcctgagtagctgggactaccagtagatgggactacaggcacctgccaacacgcccagctaatttttttgtatttttagtagagacggggtttcaccatgttagccaggatggtctcaatctcctgacctcgtgatccgcccgccttggcctcccaaagtgctgggattacaggcgtgagccatggcgcccggcccaggtaccagttcttacgaacacagctatcatgcttctgttaaagcttactttttccagagtgaagtgattctgttttattcagatgatatataatgaagttttgtatattcttaacaatctggtcagtttcttttagacgtgttctagtgtgtagtctatgtactgtggcataaaccacaaagagacttctttacatagtcctgatatctgggatgtgttgatatgaacaaataagacaaccatgtaactagatggaaataattaacaaaaaatatgtatccaggactagtttaagtgggcagaggttcatggaggtttccagtataggcaggttgggactgttctgtgtgagtaaagataataacttctgttcttaaagatagttacttctttggaagagagtccatacgtattctcaagggtgattcaacgtatatgctttaaatgtatcaagctttatggacatgtagtggttgccataaatatatttttcaaatatttttgcttagattccaacatgccatgggaggagtacctgcctgggcagagactactaagcggaaaacatcttcagatggtgagcgttgatatttctgtttaaattagtacataagtccctgttcctgttcgttattatttgagctttcttatgaggctcattaaaacctggcatttcttgcctggctcggtagctcacgcctgtcatcccagtgctttgggagcccgaggcgggtggatcgcttgagtccaggagtttaagaccagaccgggtgacatggcgaaaccccatctctacaaaaaatacaaaaattagccaggcctggtggtatgttcctgtagtcccgactacttggggggctgaggtgggaggattgcttgagctagggaagactagggtgcaataacctgtgataagtgataagtgccaccgtactccagcctgggtgacagagtgagactctgtctcaaaaaaaaaaaaaaaaaaaaaaaaaaaaaaaaccaaaaaaatctgttttttgactgtaggttttaaatttaacttgtaccatggctattttctgcttcttcgatcttttgagtttagctattataaatatggatggcttagctaaaatctggtttgtgtgcttggagttacatgttttagacttggaattaacctttgaaatcctgagagtccggagtatatcctctcacatcatgtgggagctccttccttagcatccttcatgtccgtagagcttcagtttgattatgaccacctcctttgtcccctttcttcctaccctgttagtcctcatggtacgtaaatgcagggagtccatacaaagagccagtgttttatataattctattagaaaagacaatctgttactaagtagaaattgaccgtctttgtttctagccatttgcttttagaggttgaaggaatcttagtgatgtggcctgactttatccactgcagtaatcttttctacattatcctctgcttaaatatatcaaataatgtattgtgtgtgtgtgtgtgtgtgtgtgtgtgtgtcagtgtcagaatctcactctgtcacccagggctggagtgcagtggggcaatctcagctcactacaacctctgcctcccgggttccagtgattgttttgtctcagccacctgagtagctggggttacaggtgtgcgccattacacctggctaatttttgtatttttagtagaatcggggtttcaccgtgttggccaggctggtcttgaactcttggccttccaaagtgttgggattacaggcatgagccactgtgcctggcctaaataatgtactttttactaaactgttttttccccttcttcccttttctttaagaactgttagacagtttttcctattttgaaatgtatgtcccaacaagtctctactcctacggtttgaaacatatagattatcttctttttctctcatttgggaagcctctttccatgtttgttttttaatatgttaaacatccctcgttattttgaccatttttttggtggcgtacttctagaccctagatcaccagtttgccctcctggatgaaacataattttattatccatttcagaatgctgcatttatagaaccccacaacattttagattcctgtaattttgggtatggttatgctagctgttgaaacaaaatcccacagatcccagtggcataatccaattgaagttggttttttcagcacataaaattggggtggtaggaaggtgatggtttactttagggacccaagtttatagaagttctgtcatcttcaggttggttcttccagagttgcctaagatgttgacatccacttggcttataggaggagaaagaggggatttttattggcctttcctggaaatggtacaggatacttttgcctacattttgttggctggaactcagtcataaggccacactagctgagaggatcctaggaagtgtagtttggctttgtgcacaggagaaaaaggaagtggattaagtcagcaattagtctgctacagtatgggatatgcttgtctaacacattcattttgtacatgagagaggttcaaagagatagtgacttgttgaaggtatacttattgttgacagaatggtgactagcactcagcttcatgattatctccagtgtgttatttttatctgtaaatatttactgagtttcgttataagaaaattctcccttttgaacataaccacagctccaaaaatcaacagcaattcattaatattatgaattgttgtattgtgttgctctttgtttatcccctctccctatcattttagcttgctttgtattttgcttagacttcatagtacttttgaactggcttgatgtcttctgtaagttttggaaattctcacctgtcttcaagtattgtttctgttccagtcttcctttctagattattagtaatacgtatattaaatgtcttccacctattttttggtttggtttttttttgagacagggtctcactctatcgcccagtctggagtgcagtgacgtgatcttggctcactgtagtctcgacctcctgggttcaagcaatcctcccacctcagcctctggagtagctaggactacaggcatgtgccaccatgcccagctaatgaaaaaaaaaatttttttttgtagtgacaggatcttattatgttgcccacattggtattcagtgttttttatcctttttctttctgtacttcagtctgggtatatttttctgattcgttttctagaccacaaattctctctacagctaattttgatgtactgttaaaaacatctattggaggcttaatttaattttatttgttattattttttgagttagtcttgctctgtcgtgtaggctggagtgcagtggcactacctccactcactgcgacctctgcctcctgagttcaaatgattctcctgcctcagccacccaagtagctgggattacaggtgtgcactaccatgcctggctaatttttgtatttttagtagacacggggtttcaccattttggtcaggctggtctcgaactcctgacctcaagtgatccacttgcctcggcctcccaaagtactggaattacagatatgagccaccatgcctggcctattgggggcttacttttaattacgtatttttcagctctagaatttctttttcaaatattctacatttctggctcaattttgaatcttgtctttcattcttaaatatattaaacatagttttttttgttgttgttgtttgtgtttttttgagacagagtcttattctgttgcccaggctggagtgcagtggcgcaatctcagctcactgcaacctctgcctcctgggttcaagtgattctcttgcttcagcctcccaagtagctgggattacagacataagccatcatgcccagttaatttttgtatttttagtagagacggggtttctccatgttggccaggttgatctctgactcctgacctcaggtgatccactcacctcggcctcgcaaagtgctgggattacagatgtgagccaccgcgcctggcctgaacatagtatttttaaggtttgtgtctgataattccgttgtttagatccctgtggggattgtctgtttttccttgtggtttttagtcaagttatcttgtcaatatttgcctggttatatttcattgagtggtggacattgcatatgaaaaataatgtagattaattagatctaggatgatggtttatatgtttacttctaggtaggtagcttggcagaggacactagtaatcccagaacgttttattttaatgaggaattgtgaagcagaatttcagttttgggaagattttcttataattctttgatttcgtctttaatcctagtggtagccctttgtggccgcaatccaaaatctggtggcttaccagaccctgtcaagaagcttagagctagtttttcccttcttagctccgcaagtgttttaagtttgctcagcttcttagctgtctccactggaatcatcagtcatctccagggggaaaagcagccctatttgctctttttgaagttctgatacatagattgctgacattgatcattcagctaaaagttctggtttttattcatgtgagttgttaaactagatcagtagccaacctgttgccaattttgccataattatgagttgctctttttaaatgaaatgctggctttaaacttttatttcacttcatcttgttttagtaaccatctgtgtatgtgttagtctttcattctagagttaaactttgattttaactatggatgttaagctttgtgtcatctttttcttctcctttaaaattttttttttttttttcctgttttgcttttgccagttgcagctttaaaaaaagcaattgaggtagggaggctggaaagggagttgatgttgaaaatatattcatagaagtttggggtaggtaaaaggggcagctcattgattctaaagatcagccttctgggtttgtttgacttagatgaaagtgaagaggatgaagatgatttgttgcaaaggactgggaatttcatatccacatcaacttctcttccaagaggaatcttgaaggtgagagtcagtgaagttgggggatcctatctaactacttacctctgcagtttaatttgcttcccagtagcagatgtatggattcctattatctgtggggttaaatatgtttgctgtcattttgccctggtaaatacttatgttattgttttttttttttccttttgcaaaaaatgttctagaggtattatgttcctattgcttgagctcaggagtttgaagctacggtgagctgtgatggaaccactgtactttagcccgggtgaaagcgagaccctgtctctaaaataataaataaataaataaataaataaataaataaattttccagtaattctaggaatcccgtttggtttatcttcattttcattggcatcagcctagttcatactgctgtcatctcttatctggcatattgcagtagctttgtgactggactctttacttctactttacctctttttaaatcattctttgtatggcagccagagggatcttttaaaaataaaacatcaggtcatgtcacttttcattgctttttgaaaacttctgaattccttatcgtattctacactgccctttacagtctggcttttgcctggatccttagcctcatatcagacctgtttcccatgatttcccacttgagtcacacaagcctttttctgtttcttggacatgctgctaggtcctttcttgcctgtgaacctttgctctttctcttttgttctgcctgccttgtcttcaggaagtcctaatggctagctcattcttacctttctgctcaaatggcaccttagacaagactttctctaaagtggtctacactattcactttctaactcatcactatgtctagcatgttcattatggtaaccagctgcctatgtagcacagtactttagttaaatatctgtcatactaacgggcagtactttagttaaatatctgtcatattaacagatctctctgtgacatagatatcttttgtttgtttgtttgtttttttgagacagagttttgctcttttgctcaggctggagtgcaagggcgtgatctcggctcactgcaacctccgcctcccgggttcaagcaattctcctgcctcagccacgcaagtagctgggattacaggcatgcaccaccatgcctggctaatttttttttgtttttgtttttttggtagagacagggtttctccatgttagtcaggctggtctcgaactcctgacctcaggtgatctgcccgcctcagctcccaacgtgctgggattacaggcgtgagccaccgcgcccagcgacataggtctcttttcttattacaccatggcaggagtatttaaatggggcaggggaaactattatgataaattagatacagtgattttgtcttgcaccttatgaggacaattcatttagctctttacgggtgaattcacctccattaaaaatgtagttaccacatggccgggcgcagtggctcacgcctgtaatcccagcactttgggaggccgaggcgggcagatcacctgaggttgggagtttgagaccagcgtgaccaacatggggaaacctcatctctactgaaaatacaaaattagctgggtgtggtggcacatgtctgtaatcccagctacttgggaggctgaggcaggagaatcacttgaacccaacaggcagaggttgtggtgagtcgagattacgccattgccctccagcctgggcaacaagagtgaaacccagtctcaaaaaaaaaaaaaaaaagttgtagttaccataaaaatttaacttggtggttacaaacaaaacacatacttttgtttttaactgaattttaaaaattcaaggggaaacctgtaaaaacaaaataaataacaaaatagtccaggtgatggatgtgagattaccattactttaaacttggaaccatgtaccctaagagaataaagcaacctgtgccaattgaagaactgtggggacaactgtgcagtgcctcttgcatttgtgccatgaatgcaaagatgccaggtgccaaagtagaagttttaagtgaaatttcctcagaagtgaaagtctcttaacacaaatggatgtattttggggaaatgactacatactagtgctccaagaatgagtaatacattcagacttctagatatggaaagcactttaatgatttaatctttttatttgaaagatggtaaaaatggattcttttgtggtaaagtgacttgctagttggtgccagagctgcggtttttttgttttttgttttttttttttgagttgtgtttggttaccattccagtgcatttttttccttcattataaactgtaatgtcttttcttcttactctaaagaaaataatgtttattcatttcaattgataaaatcccagctttcatttcctatagatgaagaactgccagcatgcgaatgctgaacgtcctactgttgctcggatctcatctgtgcagttccatcccggtgcacagattgtgatggttgctggattagataatgctgtatcactatttcaggtatgcatctttatttacttatttatttctaatgcattatttttatttaaggaccagacatttgcaaccccaaatgcaaaaatactgaaaaagatattcatagctaaaacatcatagcccgaagcatagctaagtctcacagaagtgacagagttcatttacttggaaatacaaaacagaacatccagtcagcatactgcccttgcttcttgctccaaagtctgtcgtcactgttttcaatcacagctgctcaccccttgcctgttcacagtttgggtcgctcaccatcccttgcccactcacatttttattgaatgcacctgtatgacttcagtgtacaaggaaccataataataggggatttggagtaaaatttttcttccactgaatataaaagttcagtaaaatagtggtttaaaataatagattgagaagtgaagaatatattaatcatgttagtgaatatattctctctacaaaaacgtgttcttttaattttctggtgagttattagagcaaagcgataatataacctcatgactttactgggtcttccatgtttaatctaacactgatgtacattgatggtttcttgggttgcaacaataaacaacagacctggcccttcacttcaggatgtcactctctgatgggggtatagatggtgaacacatggtcacaaatgtaaccattcagtcctgcaggtgcttcacagtatctgctcttggatagggtatcccagttttcttttagagaataacacttggtccagttcatgtagtttggatgggactgactcttatctccttatctgtgggtggacaaactcaagaaattagtagggcaaggtatggggaaggagcgtggagcttccgtgccttctcagggcacgccacctcctcagcacctccgtgtgttcagcaacccagaagctctctgaataccttctgttaagcctttttatgaaggcctcttgacataggcatggttgattaaatcactggccgtggctgcttaagtcagccttcagccccttggatatgtatttttaaatgaacacttgtagtgaaaagtatatactaccaggatacagggtctgtggaaataatcaaaagaaccattttgtacttctttataggttgatgggaaaacaaatcctaaaattcagagcatctatttggaaaggtttccaatctttaaggcttgttttagtgctaatggggaagaagttttagccacgagtacccacagcaaggttctttatgtctatgacatgctggctggaaagttaattcctgtgcatcaagtgagaggtaagatttctgttgaatgcacacaaccagtcattccccccaaggtgagtttatgtaacagtgtttacaacacttttttcactccataggattcttaaaaataagagtttctttaggtatagtgtttggaaaatgtctttgtgcttttgagataacacgtttgaatgaaaccagtgaacttttttactgaacacttacggaatgatcataatttggaaatatatattccccctacaccagacaagcaattgcaaatacttggctgtaaagttagcagttgatgcagcagaaaaagcatgagccatggagctagaagacctggattccatttctttggacaaactgtttcacctctctgatcttcaggaaacttggatactctgtagttttagtgttagttataataaaattttgatttatatttaaagggaataaagcactgcttttggaggtacttctgtattttaaagaatgaactacttaaaaaataacgcttttttaggaggtgaaaatttatctgccctctaccatacccattcttttcctatatttccctgctcctttatatcccaaaatacaccgacaccttcatgcatcctttgggaaccaaagcccttctaatgaggttgtctggctaatctcaggaggtagtgttggcgtatggcacggctcactggtgctctccctattaaactgtacatgcatgtggctggaaaggacaagagtagctctgtacaaccatttttctactagtggttgaaagtggatggggccaactttagaaacatttatgatgtttatctttagcatttccaatcttttctttcctgtgttcctgacactttgatcctttccaagtagatccttggtttaccctaaggcagagcttctcagaagtaaatgtgcacgtgaatcacctgggggtctcattaagctgcagattctgattctgtaggtcttaggtgggttgagtctgcatttctgattctctcaggtgatggtgatactgtgtggtccatggacctcacttggttaaaaagtcttaaaccatcttctcatattgaaatagaaaacaatatttagtagttactatttttacatgtcatttcactattcaaaagtaatggattctggcatctccttgtcttgcatcctcttgagagaaagcgcaccatgcgttggccaagatacagttagtgatctttaccatggatctgctaggtgggcaggagtgtgtgtccagtcaccaactgctttggagacatggcattgatctttccttcccagtatttctcctttttctgttttcacatttccaccgcctgatactgtgctgttaggattaggtctgtaggtgtttccagttgtagcttcacatggtgttagaacaagcctcctgtcctacctcatcacgtaatgatattttctttatgtttggaactacttcagtatactttagtcagtacatacggtttattcagaaatttggattaaaattacccttaataggcatagtggagtgcctttcatagtaaggagactagtcatcagcagaagtaaccccagtgattggaaatgtagtatgtgtctgaaataatattggggagcatgagtccaagcaagggaactaagatgtagtctttgggagacaggactagagtgggatgtccagtttgtagtagtggaaagtagccttaatttgtattttcctgtagtggaacaagggtccttaaccagatttttgtaactcctttttctctaattaatattgtaacttagtaacttaaaattttaaaaatatagacatatatttttgactaggcaatatattcacacggtgttaaaaatctactatgtagaaatgaatggatagtgaaaactctcttctgctctgtctccctgtcttcctgctttccttccttggaggtagccagttgtatgcattctgatgcatcctgttaggtaactttttaatgagtaacttggctctctaagcattttgatatcaggaggagtcccctgtatagtcaatatgaacctttcagtcatggaaaaagagacatgtccttttgtaagtaagttgactgtatatacctagctctcatatatgatttggttacatgtgtcacatccagagaagctagtcagtccttaagtaaactgacatattgtgaaaagttttggggttttttttgttttttgtttttgtttttgactcacaaagttaaagatgagattcctgtccatcatgagctgcttagtaagtggccagcagctagtttatatatgtttttatgtttttggctgtctctagtggcagtgtatttcccttctggtaatgaactttgtgacaaagaagtataatttatccttttagtaaattagaggtattactgcatatatttggaaaattagttgatatgtttactgtttggagagctgagtctctggcctgcagttaaaatggtgaatgctaaccaggacaaagaagagaagtttgttaagtgctttgtagtgaccttatgtttgggtcaaactcagtgatgcctgcgtttagacttattcggggtctgagccagggttttgtttaatttgagccacttacgtattttaaaaagtaagaaactcatttgtcaatagatgatagttttattgaaaactatataaaactttatttaattgcttcatttcctattttaggtttgaaagagaagatagtgaggagctttgaagtctccccagatgggtccttcttgctcataaatggcattgctggatatttgcatttgctagcaatgaaggtaaagcattattattgcttcttgttcttctcccacaagacactagtgtagggatagtcttgcaccttaactcagtgtgtccttaaatctgcatctccaagtagaggagcacaggtgggacttggagagaagttgtgggcagttgggggagagcttttgattacagggaaaaataaagttgagtaggtgctagaaaatagagaactaggttgtttttactctacattgtgtgattcttctgtatactttctaacagtttgataaataatatttattgttttagaccaaagaactgattggaagcatgaaaattaatggaagggttgcagcatccacattctcttcagatagtaagaaagtatacgcctcttcgggtaagacaacgacatgaaagaagctaaggatatttttacattttaaattttaggccaggcgcggtggctcacgtgtgtaatcccaccactttgggaggccgagatgggcagatcacttgaggtcagcgggtaagatcagcctggccaacatggtaaaactccgtctctactaaaaagaaaaaaagtagctgggcatggtggcatgggcctgtagtcccagctacttgagaggctgaggtgagagaatctcttgaacctgggagacagaggttgcagtgagctgtgattgggccactgcactctagcctgggggacagaacgagactccatctcaataaaaaaattttttttttagccatctatcctgggcgacagagcaagactctgtctcaaaaaacaaaagcaaaaaaacctaggaccaggcgcggtagcttacgcctgtaatcccagcactttgggaggctgaggcgagtggatcgtttgaggtcaggagtttaagaccagcctggccaacatggtaagaccctgtctctgctaaaaatacaaaaattagccaggcatgctggcgctcgcctgtaatcccagctagttgggaggctgaggcaaagaatcacttgaacctgggagacagaggctgcactgagctgagatcacgtctcaaaatatatatatatatatatatatattttttttaaacgaaaagttgtgtttggttttaaagtttctttttagctagaaaatcagatctatttttagaattcatttttgttgccattgccttctcattaataatagtggaggactaacaatttaacatgcagttttaacatgtttggggaaagaatgggaagataatgcttatttaaaagattattcaggggtaaatcattctcctatgattccccatgctatgaaaattaaaataaaattttacatgcctttttttctctattctctcttttgtcacttggttttcaggaaaccttcagggggcaaaggaaaaacttccactacagtttcatttatattaacattcttgaaatgatgaaatcgtagaaatagagaatagattagtggttgtgagggtttaaggaggatttgagggcaggagagaagtggaggtatctataaaagagcaacaggaggggtccttgtggtgatgggaagttttgtgtcttgactgtatcagtgtcactatcctggttgtaatgttgtcctgtagttatgcaaaatgttaacattgggggggaactggtaaagtaaagagtacactgtgttttctgtattattccttacagtgtgtgtgaatctaaaaggcataattttaaataagtagtcctacctttcttaaaaagataaggcagacattatttaaaaaaagatgattcatttgaaggttttctgactttctttttgaaagttacttaaaatcatcagcccttgtagcaatactctcttgactttgatggtgtgttaaattttctacattattgtccttcctgacatttctgtagctcttttgattaacctgcactgtcctgctcttctacctttctgacttccctaagacttgttaactcttactgtctatcccaaaggaccatgggggccatcccttgggacagctacataatcttagtatagctaatgctgtgtttggtagcgggagactttcaagtggttctgctctgtgggtagtagtcagcaacctctgtaaagctttttagcataatttttatttgacctcagctaggagcatttggtaatataacattaataaaattaatagcattaattaaaattattttttaacttttaaaaaggattaattttagcttaacattaatttttgttttgtttttgtcctagaatcagactttcacaaggttatttacattggtatgtttttaatcaatgcatataaggccaggagcagctatattttctatattatactagtttttgtgagaagaaagaagaaaatgaagagaaagaggaaggaagggagggagggaaggaaggaaagatggaaggaaggaaggaaggaaagaaagaaagaaagaattagttcagagtaatattcctgatgaaatggcccttggccctggtagagagagagtcggggagggagaagaggttggggagggaaaagaggtggggagggttggtcagcagaagtactgaaatttgatatatgaattggacgcagatataatgtatttacaaatttggtcatggctgtggagatctaatttatcataaggtcctaagaaagcagggaaggagaaatcaaaagttgagccttggtaagttaggggtaattttgaaatgttgatggttctcttcctctctctccgcttcttcctccttttcttcttcttcttcttctttttttttttttttttttgagacagagtctcactctgttgcttaggctggagtgcagtggcacgatctcggctcactgtaacctctgcctcccaagttctagcaattctcctgcctcagcctcctgagtagctggaattacaggcgcataccgccatacccagctaattttttgtattttagtagagacggggttttcttgtgttgcccaggctggtctcgaactcctgagctcaggcaacccacctgcctcggcctcccaaagtgctaggattacaggcgtgagccaccgcgcccagccacttctttttttttttttcagactgagtcttgttgtgttgcccaggctggagtgcagtggtgtgatctcgcctcactgcagcctctgcctcctgggttccagcaattctcctgcctcagcctcctgggtagctgggattacaggcacacaccaccacatcggctaatttttgtatttttaatagagacagggtttcatcatgttggccaggctggtcttgaactactgacctcaggtgatctgcccgccttggcctcccaaagtgctgggattataggtgtgagccactgcgtgtgcacccttttcttattctgtatggagtcgtttgtgtgattagtaacatattgttcacattacattgttacatgtaaagaataatttgagataaaaagagttgaagaatttacctttttctaactttactggttttgtctttgtttactcatggatttttttttttttttggagacagcattgctctgtctcctaggttggagtgcagtggtgtgatcttggctcactacatcctctgcctcctgggttcaggcgattctcatgcctcagcctccccgagtagctgggattacaggcatgtgccaccacgcccagctaatttttgtatttttagtagagatggtgattcaccattttggccaggttggtctcgaactcctggcctcaagtgagccacctgccttggcctcccaaagtgctgggattacaggcatgagccaccatgcctggccatctcatgttgccttttttgccataagtcatcaactcatgaccatttcatgcacttgctttctagatgttcttgcttttgatctcttcccattttagtctactgagagactaatctttaaaacactttcctttattataacattaatgtacaggcagacatataaggcaaaggttttaatatttgatcctattcagttttcccaaatgtgttttactactgcttaacctgcacgcttactctagcctggaacattttatttgttagggagttgaaactgagattcactgaattctcattgggagaataagagtacatatggaagggtgaactttagagcaatatcctgcaaggaaggatattgaggtactagaaaaaggaagacgtaaaatagtgaggatccacttttgagatggatgtagggtcattagagtaaactatttgtgcttattcgtaagcttgtgtttagccttttttttttaatcatttaaataacttggtaatagataaattgtgtgtgtcttcttaattataaattcccgtgttctggatccgttcatttttcacttcttcctcttccatcatcattaacattttggtatctaaatcgctaaccttgcctattaggtagtctaatacctgttgatagatgttggaagagttacactagtgagtggtgttttgttttgcttcagatttttgcttcaataatttatctgagtggaacttagaagctttttctaaaagttcaactcaaaccaacagcttgtgatttttttcctgtaaacctaaaggtactgtctattaatgactaactgatgcagttttcttttgtatatgtgaatgtatacaagaaatattcttaggccgggcatggtggctcacacctgtaatcccagcagtttgggaggccaaggcaggtggatcacctgaggtcaagagttcgagaccagcctggccaacatggtgaaaccctgtctctactaaaaatacaaaaattaactacgcatggtggcacaaacctgtaatcccagctactcgggaggctgaggcaggaaaatcacttgaacccgggagaaggaggttgcagtgtgctgagatggcgcagttacactccagcctgggcgacaagagaaaaactgcatctcaaaaaaaaaaaaaggaaaaaagaaaagaaatattcttagtccagttttccagaactaggagggttataataggtctgtatttgtagtctcctgtactgttaagagggactgagagtggccagtttacttgcctttcaagtttaaagcaaaattaacaactctttttttcgctcttttatgcaggggatggagaagtttatgtttgggatgtgaactcaaggaagtgccttaacagatttgttgatgaaggcagtttatatggattaagcattgccacatctaggaatggacagtatgttgcttgtgggtaagtaaagagaggttcttgtaaccttaatcacattgtgctaatgagaatatgttgaggaattgaatatactaggtggtgcatgagtagttctctttataaactattcagtaatatgaaattggtcaacccagctgagcttttttcattttatcatctttgtgcagtgttgaataataatattacagtagttccccccttatctgcagtttcactgtttgtggttttagttacctgtggttaatcacaatctgaaatctatgtaagatattttgagagcaagagaccacattcacgtaacttttattaggatatattgttacaattgttctgttttattattagttgtgttagtctgttactatgcctaatttataaattaaacttttttatagagatgtgtgtataggagaaaacacagtacacacagggttcagtaatccacagtttgaggcatccactgggggtcttggaacatacgccctgccagataagaagggattactataattgcagttgaacacctttttagcaaagaaaatgctggcgctaccttatatcattgtattttttcctatttaaaatacctgtttgatcacatcaagttttcctataattattttcagcttcttgtcattgatgaggagatagaataagtaactttgggtttaaatcttaaagatacctaaagcatttttcctttatccagctgggggtataaataaaaaacatgttcctaggaaataccatttgatagtattgtagaaactttaaaaatattatctagaacacattgtactgtgctattactgaaaacattggttattacactggggaaaagatggctgtgttctactacttgattctgaagatgcagggtgagaggatgaggcattggatacttcgcagtaattctaagctaccttactaaaccactaattagaacccataattctgtaacttcaagaagtaggtttttgtgattttcttagaccaaacacaattgagccatgaaatgatttcagtcaaatcctccctgggatgggaagtcaaggggtcttgttgtccagaaacttagcatactctctactctttgttcactctctccttccaggttaaaactggggaaactgcttgtatatatatccctaccaccgtttgcaaattggagtttgggaggaaaggcaagtagaactaggctgtggagcttggagaccaggccatctgccttaggcagtaagacagtaacagatcccttggagggagagtgccctgatgaaggccccttcctttcctacccatacccgtgccaaccctgtagcgagggacatctcagcacaagccaagcatttaccagggtagtgtgcgctatggcagcaattcatgagtagcagatcttctgggaataaagctcctttaaaatgaagactgctgtttaaactcattataagtagtttttaaattttttttattatacttttaagttttagggtacatgtgcataacgtgcaggtttgttacatatgtatacatgtgccatgttggtgtgctgcacccattaactcatcatttagcattaagtatatctcctaatgctatccctcccccttccccccccgacccacaggccccggtatgtgatgttccccttcctgtgtccattataagtagttttaagaactgcatttgcctctatatggggcaagaaaaactgcgcagaaatgatcttcactcagatttgtgaagccagtcttcattgccctctcttttttgtatcactttttattagccccctttgaagggcctatataggaaagaatctaatactagtagcttaaactcatttaattttaattgcccttcagtgtaattgatttctgatgtgcttggccaacaaccatttaagcttttagaatcttcaagttattcttaaagaatcttaagcaaatctttaagcttttagaagaggaagaaaggacagggagatgagccttgaggtcactgcagcaataggcaggcatcaggtaatgagtcaccaggacagtaggaatggcagtgggggaataagcaaaggatgtttgtaatgtatttgataagtgcttagaagatggggagtgggagagaagtattcacattctcaggctccaggcctgtgcaaccagaggagtggaattgtcattgaagggaggcgggaggaggggtgatggtgttagaagagataatatgcatgtggccacccccacaaacctttaggaatgcagtgcataattaggactaaaggcactgatttggatgtggtgggtgataggtggtctgtgggagtaaatgagatgaatgagacactagaagtaggttggaaatagaatcctggggacaagaatcagtggagaaagaggtgactgtgaaggaatcaggatgcaagaagagtcagtaaagtttagccttcaagaagtcaacagaagggggagaatttgaattctgttttcaacctgtttggttggaggttctataggacatctgtggctatagtggtgatagctggtctctttgtaacatgattcctgtaaataccagtttgtggggttaaatctatattcacttaggttgtgaaagcccttttacttggtttttaatctattttaatccttttctctttgtagttctaattgtggagtggtaaatatatacaatcaagattcttgtctccaagaaacaaacccaaagccaataaaagctataatgaacttggttacaggtgttacttctctgaccttcaatcctactacagaaatcttggcaattgcttcagaaaaaatgaaagaagcagtcagattggtaaatatttcattacccctttattattgttattttttaaatttaagttgaaaacatgcaagagtaacaggaaaggagagcgttgaattatttttaaaacagtggcttcttttgatataggaattattagtattgtagcttttggatgtggttgttggaaggatgcacagtagccaccacatttgattatgtcacttctttcagtaaagctttgctgtccattctcaccattcctaaagtggtcctcattttcagaggtttcttttagtattaatgttaaggactatatttaaggcagacacttcattccttcacaattttctttcctcatttacctttttaaggcctgttgtcttaacagaacggaggcaattctcgggttttgaaagtaagttgaacttgaaaattaaattgtataaaagtattgtaatttaaatagctaggtagtacctttgaatataccctttgtgttaggaatccgcaggaccacctccaggtttggtggctaacgagagatgacttccaggactctgcatatgttcattgaactcatggctaaaatgtattgcagtggaaaggatacaaagcaaaatcagcaaagggaaagggtacatggagtaaagtccggaggaaaccttctaagagtcctcttctagtagagtcacacaggacagtttaattcctccagtaatgagttgtaacaacatgtgttaagtgttttctacctgggaagctcattagagactcattgcagaaggtttttattgggacttcatatagggtaccctctgcctagcatgtaccaaaattctagattcccagaagaaaagccaggtgtttagcataaaccacattgtttgtacaaacagtttaggcacagtgagctacccatatcatttagggaaagtttcatgccagtataggaactgtgtgctagtcaaattctccgacactatgcagtggccacccttgtaagcagacctttctgttttttttgttttttttttttttgagaccaagtctcactctgttgcccaggctggactgcagtggtgtgatctcggctcactgcagcctccgcctcctgggttcaagcgattcttctgcctcagtctcctgagtagctgggattataggcatgcgccaccacgcccagctcatttttgtattttttttttttttttaagtagagacggggtttcaccattttggtcaggctggtctcgaactcccgacctcatggtccacctgcctcgggctcccaaagtgctgggattacaggagtgagccgccgtgcccagcccagaactttctaaggatagcagccttgggcctatgtaaactcttttctgcccaacatcagagctcactttcagtgtcaccccatctctgtgaagtttcctaatcttcaggcagagccaattttctcattcatttaacaattttttgctcaaggcaccaggtatacagaaggcatagaactttgaatagcagaattatgtttgctgctatgtgtgtactaccagattgtacgcactttacaaagtgtgttatttttattgtgctcacttggcaaaaagccttgcatctgccatcagctttgtattagaatatatcgtttacaaagatttacaaagagttctacaaaaagtttgagccaagtaacagttcttcagaggattaacttaaccaaagtaaacagttaataaagggcagaattgtgatttagattccacatttttttctagcagttcattggttttctggctgaattccacagagccctagattctgcacagggctttatatggcatgtagggcaaggaggaggctaagctccttaacttgtatcatgtagagcagtgtcattgttgtctgtggtatatatattgggattctgcatatgatttccttaagaaatgttttgttgcgctgggcacggtggctcagacctgtaatcccggcactttgggaggctgaggtgggtggatcacttgaggtcaggagttcaagaccagcctggccaacatggtgaaaccccatctctactaaaattacaaatattagctgggcattgtggtgggcgtctgtaatcccagctactcaggaggctgaggcaggagaatggcttgagcctggaaggtggaggttgcagtgagccaagatcgtgcctctgtactccagcctgggtgacagagtaagagtctgtctcaaaaacaacaacaacaacaacaaaatggtttgctggaaaaagagtgtgaaaattacagcatagcattttattgctatgctgttgaatgaatcatttgataaatgagaaggttctaattcaagtcagctttaaaatccctgctccctaatgggagtggtatactagtaatattaaccttttatcactttaatggtagtaaattgttttagaaaaccatgggatctatctcctgttgacataatatattctgcaagacacataatagttctgcattgtttgcttcagtgatcatgacagcatttatattttttttattgtggcaaaatcacataaggaattcattagtaaaagccaaatcacagtttttaaatggtagtcaaccataatatctaatggaaagaagccaggcatagcagctccatataatgccttgtaaaaaacattgttagcattgttaaatgcagtcaattccttataatgatctagacggttttgtcatcccattacaaagcactgtgaatttaagctgttggactagtaggagactcagaagtcaaattcctgttacatcgacaattttggatatagtagaacgtcatggaactttctacccattaaatcaaggatgagcgagcttttacttgttgaattttgatatctgtacacttaactgtcgtgatagaaatggtattagaaagctggctgcggtggctcacgcctgtaatcccagcactttgtgaggccgaggcagatggatcacctgaggccaggagttaaagaagttggatctttataggcatttttcctaattaatagttcaattataccttttaaaatgggggctataaatagatgtcagagcacagcatagttttaatcaggtgagatcattggcttgagggaagattcaccaatgcattgagagattacactggggaattttgcaggtagatgctgttgatctcttaggacattgtaaacaattcccctccttttcccgatattccaagtcagtagcagagataaagtttaaaaataggtcaggtgcagtggcccacaccttaatcccagcactttgagaggtcaaggtgagaggatcacttgaggccaggagtttgagaccagcctggccaacatggtgaaaccccatttctactaaaaatacaaaaattagctgggcgtggtagcccacacctgtaatcccagctactcaggaggctgagacagaagaattgcttgcccccaagaggcggaggttacagtgagctgagatcgcaccactgtactccagcctgggcaacagagtgagtgagacttgatctcaaaaaaaaaaaaaaagaaaagaaaagaaaagtcattcagatagaaaggttggttctagtgtattttgatgaggaagagtcagaaaaccagctccccaaacttcaaagtcattccaggaaagttggtgagtgaatgcctgaggcctagtttcatagtatcaggtgaatagggtgggaacaaaaggcagaggtagaacagctttgtcctcaccccttgtagcaaatgtttttttcctgatcatctgctttcctgatgctttggatcatctgttcatagttggggcatgcttgaaggatacaaacttacaataacccaagtgaaacacagttaagccaaggtacttatcacaaatttatataatatctgccttcccaaattaaatgtaaataaattttgcaatatccatgttgtggcttctctctgtaaaacaggagtctgcttttttactaagtgcttgaaaaaatatatatacttaaaagtaatttctcgaggaacctgtatagagagtggtatttaagaactttagaagtgaagtccaaattggggtactgccaacttcttagctttaatgggtcaagaccacttctcattagcaccattgccttcacattgatgccacgctgtgcaggcagaacctgccttctggcaaagttgaaaataattgaatgtggcttggagattcactgtaaacagtattttcttgacaaaatggtcagtaagtatgtatcagaatttggcctaatatgtgactgactgaaaccagtttaataggtgtatgtatcagtggtttttacccagcacttgcctgtgaaaatcactttgatggtataaagtctgacctagaagtgtggaggatgactaactgcccagctgaatgataacggttgtatatatttgaacatgaaggtgctatatctcttgggagagctagagaacatctgaaagtgagtgttgttacaattgtggcctaaaggtaactgcttccatacctgggttttattcatccacaaattgggtgaggacctgtctcaactctcctgaacttaggaagtagactctggagaaagagactgtgtgtgttcctcctcatacttacgtctggctttgaggtgagcttttggctctctctaaatcagaacagtttcacttggagttagattttcatgattcagccctcttcgaggagaaattgtaaaaggcaaagtgtatatacaatagttgaaaattaaaagtacaaaatggcaattttatgatagtagaatatatgtggtatgactttgcctaggcttcagttatgtaaaatcagactttataatgtttaatttttttcaccatttaactaaccagatgaaccttcatgtttaaaatctcttttccctgtgatcagattttagtattctttactgtggtcattaagctagagtgggtactttttgctttagtttattcattaatttactcattcagcaaacatttgaatctctgaggcatcatgctggatgctgtactgacgcttttttctctttcttccttttctgctcagttaataacacattaaagatcaaattttatagtgtgtacacatggacacagtagaataataggcattggagacttggaaaggtgggagcatgggagaggggtaggggatgagaaattatctgatgggtacagtgtacatcaatcttgtccaacccacggcgcaggacggtttgattgtggcccaacactaatttgtaaactttcttaaaacatgagttgttgttttttttttttttaagctcatcacctgtcgttagtgttagtgtattttatgtgtggcccaagacaattcttcttccgttgtggcccagggaagccaaaagattggacacccctgtccaccattggagtgatggtgacacttaagagcccagacttcaccactgtgcaagaaattcatgtagcaaaactgcagctgtatctcttaactataaaaataaagtaataaaaaaagatcaaacttaattttggaacactttgctgcactaatagactgtactttcttgtgtgctacaatcaaaatgagctttatgtttcagcaggaagatagagtgaagattacaatttaagaaacatgagctcccagttgttacactttaaagttttttattatctcctgcaggttcatcttccttcctgtacagtattttcaaacttcccagtcattaaaaataagaatatttctcatgttcataccatggatttttctccgagaagtggatactttgccttggggaatgaaaagggcaaggccctgatgtataggtaggtattatttatgtttaaaagtcagagatacctataaactacttctgacagtatgaagagatactatatattcctaattctacagttaataaattctagtctgtttatcttgactctcatcttcattatcttactttgggttattttattttattttattattattatactttaagttttagggtacatgtgtgcactgtgcaggtttgttacatatgtatacatgtgccatgttggtatgctgcacccattaactcgtcatttagcattaggtatatctcctaatgctatccctcccccctcccctcaccccacaacagtacctggagtgtcatgttctccttcctgtgtccatgtgttctcattgttcaattcccacctctgagtgagaacatgcggtgtttggttttttgcccttgtgatagtttgctgagaatgatggtttccagtttcatccatgtccctaaaaaggacatggactctttattttttatggctgcatagtattccatggtgtatatgtgccacattttcttaatccagtctatcattgttggacatttgagttggttccaagtcttttctattgtgaatagtgccgcatcaataaacatacatgtgcatgtgtctttatagcagcatgatttataatcctttgggtatatacccagtaatgggatggctgggtcaaatggtatttctagttctagatccctgaggaatcgccacactgacttccacaatggttgaactagtttacagtcccaccaacagtgtaaaagtgttcctatttctccacatcctctccagcacctgttgtttcctgactttttaatgatcgccattctaactggtgtgtgatggtatcttattgtggtttttatttgcatttctctgatggccagtgatgatgagcattttttcatgtgttttttggctgcataaatgtcttcttttgagaagtgtctgttcatatccttcgcccactttttgatggggttgtttttttcttgtaaatttgtttgagttcattgtagattgtggatattagccctttgtcagatgagtaggttgcgacaattttctcccattttgtaggttgcctgtttactctgatggtagtttcttttgctgtgcagaaactctttagtttaattagatcccatttgtcaattttggcttttgttgccattgcttttggtgttttagacatgaagtccttgcccatgcctatgtcctgaatggtattgcctaggttttcttctagggtttttatggttttaggtctaacatgtaagtctttaatccatcttgaattaatttttgtataaggtgtaaggaagggacccagtttcagctttctacatatggctagccagttttcccagcaccatttattaaataggcaatcctttccccattttttgtttttgtcaggtttgtcaaagatcagatggttgtagatatgcagcattatttctgaggcctctgttctgttccattggtctatatctctgttttggtaccagtaccctgctgttttggttactgtagccttgtagtatagtttgaagtcaggtagcatgatgcctccagctttgttcttttggcttaggattgacttggctatgcgggctcttttttggttccatatgaactttaaagtagttttttccaattctgtgaagaaagtcattggtagcttgatggggatggcattgaatctataaataaccttgggcagtactttgggtaattttctaccataaaatgtcactagcaggaaacttcacctggggaatatatatattttttggaaagcactattttgagaatgtcaaattgagaaaaagccactttaataatatttccactttcttcgtgccttatgtttagattagcttttgctgatttaataattcagtttactccactagatttaattgatttctttttaaaaggtgtttctttccctgtagctgtaagctgtaaataagggtgttaaccacaaagataaccaaaacttatatgcgctgtccaggttcttttctgtacccaacatacttggctataaaacaggaacaaacaaaacctaattgcatcattgctagaagatataggtgacaaggtggatctttagggagaactaaagagctttcagtagaaaacttgtgatgtaaatcacagccctcttgccttgctccttgtgttggtagtgaatgctacatagaaccctgtgtttatgtttgtatgctttagggaattcctgctttcaaaacggactaaaatctggagtgaagaaaaggaggaatgtaaattggttttgaggaaatagttgtgaaaggagaatataccagacaataatgtggtttacagttctacttactttgaaaggaaaacaggttataccaggataatttcatcagtctcatttcagatcagatttggagtggttctgtttcagtttgtattttataaaaggatgcagattcttattgcacttagaattttcttccaaatcctttggtatttttataagtgaaatttttttttctctaagacccaaaggccattagattttccaccagagcattgctctttagaatgacactgtttctagctataccagtgactggaattgactgatgacatttttattgtttatgtctgatcaggtatttcatagaccccccatgtgaaactttggagtaagcctactcatgttacctaaaatctgaggcgttcagatcctccagaatgtcagattgaggagtctgaacctaactgcctggtgtgaatgattgtgattacatatttttcccactaaaatcttcctaagtgcccttctgtgatctaattgaaaacactgtgggtaattacaaagttgttcagatgacttattttttacttttccaggttgcaccattactcagacttctaaagagactatttgaagtaagaaaacccttttcttacaaattctgcaggttttaagatacacccattgctgtcagttggtggaagcagcacattagctgagctttgtttctctacccctaagttactgcatctttatttagaggggtgggttggaagtagatcaggaactgtctagctgaagttggaccctcctttcttatcccaaatcacagcaatctggctcggttcttctgaggtctgatctctaatgttgcattcaataattctcatcaaaattgtaattactgaacatgtttaatccacaaaagacttaataacacagagagatgggtcttcagatatagctatagcttgtatgagcttgaatcctcttattatatatatgtttcttgagagattagcagcttgctctgtttcacagagctagataatggggctggccattagttctgctgcccaatatttaaaaccatagaacatccttcccttctcatggtgtcctttcaggcctgagatgtggtggttctgagattgagctttgcaattggcctcttcatcacagttgactgtttggtctcctcagagattaatgaatgttgagggactttgagaatgcagatagatttaattaggacaaaggatttttaaaggtacaggcattttgggcaaagctttagcaaggaggggaaagcagtttagctctcctgtctcaaaagattacattgccagtacgtgtctgttgatgaccagcagctataaatcaggtatgtaatttcttttgttctttcctcaggtccagttgagtcacaagagaagcctgtcttgatatatcatctcagaaactttcctgaatatgtgataatatatggaaaatgatttatagatccagctgtgcttaagagccagtaatgtcttaataaacatgtggcagcttttgtttgaaaataagtgtatctggttcttccctccacccccaacacacacacacacaaacttggatgcatttaagactaaacatgagaaattggaaacacctgtctgtagccaaaaataatataagcagattttctcatacttctcatacagctaaccctgatgcatagatctcttcctgaatagatcccccttcctgaatcgatcctccatgctttaggggatcagctaacaggtagtctcttgagctatggaggtcagtcggcttgatatgagagcagtgaaatctcacgtagtgaagtttgaacttccaagtcttccaggaaagatgattttggaaatgaaaaggcttttctggccttattacttcaaatctttgtcattgtcatttgaagaggagccatagtaaacctggtagccttgtcctacagattattagccactgcccttcctggaaatgttcattatgccaacttaaatgtttaatttgtatttcaaggttggcagctggctccatagttctcttatcataatataaccttgcttgagaccagtccttacatttcttaggaagaactgacaccatatcgtgcatttaggaagtattaaaggggttgggcgggtgttacgagaagtatcaagttaggtctaatagcttttagccccaccctctactaaaacatggaagagagaagtcggcggaggagggagttttttcagcaacagaaagtagctttgcccggtgaagtaataggttccaggtcagtggagagtcccttcgtgtcttcaaggctctcctgggtcagctggagaggacgtaggacatagagcagtccaataggtatgggttgtgttaacttatcccagtgtctttctaaaagaacattttctgttgagatggactgttgcaatctaattgtggagacccttcccctacttcctcctttttcagcaactttttccatagtaaatactattaatgctaaaaccttgaattcctgaaaccagtgggattgttagtgctatttctctctcccattgctagagggcagcattggatcacatgaatagttgaaggcaaggcttttggagctttttgctgtcaccttgtccttagcttcagcaaaattgtttcagaaatggacaccaagccttatatgtgcttattttgcgtatggttttcagttcccagaagtgtgacagtttataggaacttatcctacagaaaatgatggaagcagagtctaaattttaactgttctttgttaaactctctagatcatttttatacactactaggagcagaataaagaatccagttctaatctccaagatagacagatgtgctatttgttctacagaggtgctactaatcctgtgtcttgtattgtaatgtttaatattttttccccctcaatgagagttagggattcgagtcagactttcattgcgtctccttgtaaccagtgccaagctaattcttcaaggaaatgagatccatagccatgaaattctttacagatgctcttttggcagttgctgtgacagcatgaaagtggctcatgtctctctgttttggggggaaccatcttgagctgtgaggtgatattttgccatccagagccacacaggatgtacttgggtatactttgataaatcgacaagttgaaatctttgatgtatcccattcatctctcccccacatcctcactaatagttagtgaaccgaagaatgattagtcttacgaagacgtttcctctgtttaaacaaagtccaggtgaaaagtcatttgccttaccgatggacgttaagtgtgtgcgtatgtgtgtgtttctggtacggatatgtaacctgttataagctgaccagctgaagggtttgtaggcatatctgcacctccagtttgaggatgggatggaggcaagcaaatgcccatgaagtcaggtgctggctcacagcttcgaagagttcttaagctacttgggatgatacttaaatgcatctgcaaagtcattacacaagaaacaaagcattttccattcttttaaactggaggaaatggaggctggcggagaaggtaggctgtggggatgtggatagcctttccgaccccctggtgctgtaattgtgctgacatcagtaatacatacatagaatctcatataattctcgttcctctgtgaggaaaataacattgtcattttacaggaaagtaaattgaagtttcaagagattgagcatcttggtcccaaagccatcattttgacatagatcagtggtccacaaagcagggtttgcatactcttaagggtatgagatacagccctttagattgtgggaaggaaatactagaacttctatgctgtgtaaaaagtatttttgtcccagttactcgggaggctgaggcaggagaatcacttgaacccgggaggcggaggttacagtgagccaagttcatgccactgcactccagcctggcaacacagtgacactccgtctcaaaaaaaaaagtattcttgttacataatgtattcatactgtagatcatagagataacttagaaacagatagggttttttgttttgtttttgtttttgagacggagttttgctcttgttacccaggctggagtgcaatgttgtgatctcggctcactgcaacctctgcctcctgattcaagagattctcctgccccagcctccagagtagctgggattacaggcatccaccaccacgcccggctaaatttttgtatttttagtagagacggggttttgccatgttggccaggctggtctcgaactcctgacctcaggtgatccacctgcctcagcctcccaaagtgctgggattacaggcgtgagccactgcacccggccataaacagatatgtttacattggtacattcaatgtacatttcttttttttcttttgagacagggtcttgctctgtcacccaggctggagtacagtggcatgatcatggctcactgcagcctcaatctcccaggttcaagtgatcctcccacctcagcctcccgagtagctggtactacagaggcaccccaccacgcccatctaatttttatatttttagtagagatagggtttctccatactgcccaggctggtcttggaactcctgggctcaagcagttgcctgcctcaacttcccaaagtgatgggattatagacgtgagccaccgttctcacctcaatgtacatttcttattaaaggaccactggcctgggtgcctggctgccatgccaaacttgacacatttccacaccctgtcctccactgttcccaaacactttttatgttccctataatgttaaagcttctccattaactgtcacataagctaggtagtttagactgactttaaacttgagttttttctctagcccaatccctgctacaaagactggttcaaagcattatgtttccaatttttctctgtaatgagtaagacctagtatttaatggcacaacaaagtgacaaagtgactatagtcagtaataacttaattgtacattctaaaataacagtgtaattggattgtttgtaacaaaggataaaaacttgaggggattgatagcccacttgccatgttttatttttattttttttgacagagtcttgctctgtcgcccaggctggagtgcagtggcacaatcttggctcactgcaacctccgcctcccaggttcaagtgatcctcctgcttcagcctcccgagtagctgggattacaggcgccccccaccacatgtatttttagtagagatggggttttaccatatgggtcaggctggtctggaactcctgacctcaggtgatccacccacctcggcctcccaaagtgctgggattacaggcgtgagccaccgtgcccagccccatgatgcaattcttacacattgcacgcctgtatcaaaattctataaacttaaaaaatctgacttgattacagacagaacaaaaagttggcgacagagtcaaattccataaaatatttgagggaattattctgagccaaatatgagtgaccaaggcccgatgcagactctcaagagatcctgagaacatgtgcccaaggtggttgggttatagcttgattttagatattttagggggacagaggcatgtaaggaaaatacattttggggcccccaaatcactaagctaaagggaaaagtcaagccaggaactggttagaacaaacctgcctcccattctattcaaagtcatccctgtgctcactgagataaatgcacatctgattgcctcctttggagaggttaatcagaaactcaaaagaatgctactgtttttctctcacctacctgtgacctggaagccccctccctgcttcaagttgtcctgcctttctggacagaaccaatgtacctcttaacatatattgattgatgtctcatgtctccctaaaatgtataaaaccaagctgtgccctgaccatcttgggcacacatgttgtcgggactccctgaggctgtgtcacaggtgcaagtcctcaactttagcaaaataaactttctaaattaactgagacctgtctcagatattcagggttcacattttggtaaccacaaaggaactctgagtggaggtgcctcccggcctttgacaaatctcctattggtgcttggtaccatcttgagctgtcttgatggctcaaaccaatagggcaatttgctgaggcctggaagcacgccctccagagaatccctgatctctcaaaatttggtcaagatctgaagtttattttgctttacaactcctttttttcttgtgagttttatttgcttcctccagcacaaggaaggctagttttcctgcttccatgacaaataggttactcctttagggctttgagcttgctcccaacagggaaggcaaatttgagggttttttttcctgcttctaggataatagagagcagtctccagcctgagacctgtccctaggtaagtaactgaattggggtttgtcttggctaaagttaaggttaacaaccaactggtcttcatttctccttaccattagagtgctcagtaatcatttaagttgtgcaattgtttgttttgcttaacggttttgttgttgtttgtctctgtttttgttctttcaacctttttcccattgggtttgaccaactgtatctgacttgatcaagtccaaagaaagtttcaaattatggggaacaagccctctgaattggctaaattcccaacatacacaaaaaggtggacttgttatgtaaataaagcccttaagtagtccaaataaacaatctttccttttttttcccctcttgctggctgtttttcaattcccccatactcccccaacaccccccttcccacacacacaaaggtggtatggtgaggggagaaaaatggccaggaaaaagaaaaaaaaaaaggaaagatatttgattttgattacttaaggggctttatttacataagaaggccaccttttggctagccaggccaaactgtaagagcaatggctgttaccctacagtggagttccatagccaatgttctgccttctttttatcaccacgacagcctgggttttgtccctaaatgaagccctttctggtttaatacttggtacttctgaaatagcagcaatttgtcctatttgaaatatggtaatgaaatctaaaaatatttttttaaaaggagctcaatggttaaaagtcagctcaattaaaagctaacatcgaagatgcgtgtgtgtgtgtgtgtgtgtgtgtgtgtgtgtgtgagtgtttgtattttaaaggccttcatttttttttcctcttaggaccttgtcttttttttgaacaaaaccttttttcttctctgttgactgaattctgttttctttatttgcttctgctgtccttcctttctcttgcaccctctgctgcatgaagacctaaaatagtttataatagtctgaagttcctaaaaggaaaaagagaaggtataatcccagcactttgggaggccgaggagggtggatcacgaggtcaggagatcgagaccatcctggccaacatggtgaaaccccatctctactaaaaaaaaacacaaaaaattagccgggtgtggtggcaggcgcctgtagtcccagctactcgggaggctgaggcaggagaatggcgtgaacctgggaggcagagcttgcagtgagccgagatagcgccactgcactccagcctgggcgacagagtgagactctgtctcaaaaaaaaaaaaataaataaataaataaaaaaacagagaaggtgccagactcccttttgggaaatgtctgtttttccttatggaatccaaagagtgtaaacagacaagttcgtctcagctttcaaactgctttcttttgtattgtgttacctgatttttttaactaaaatagttattgcaacagaggcaactcttgggttgttaaggaagaatgtagtttagacacttagaaatgtctttgttaaaaaaattttttttgagtgcactggaaaagcatgaggtctagcctcatagtaattctccctttttggagatccaggattcagtgtgggctctgcccagagatcagagatccacttaaaaggcagatagtccgtatctaaataaaattggtttccttatacaatcctatgatagatttctataattttatgtttgatttggcatccatctttaatctccctctagcaacaccagactttttctctctgtaccttgagatgtaaattttgttacctgatttttcacctaagagttgtttccttcgatatgcagatttaaggcaatttagctgacaactgccagggtaatgaaacaggttatgaagagtttgcaagtctaagacaggaaaaaaaaaaagtaggtcttatgaatctataagatgtacttctactggtatgcctaatatgtctatgtaattatgtattgtgtacacaatgtttcactactaaaaatatataaaagctctaattttcattccaagatggctgaataggaacagctctggtctgcagctcccagagtgatcgacacagaagatgggtgatttctgcatttccaactgagatacctagttcatctcactggtactggttgaacagtgggtgcagcccatggagggtgagcggaagcagggcagggcattgcctcacccaggaagcgcaaggggtctggggatttccctttcctagccaagggaagctgtgacagactgtacctggaaaaaacgggacacttccacccaaatactgcacttttcccaaagttttagcaactggcagacaaggagattctctcccatgcctggctcagtgggactcatacccacggagccttgcttaaggctagcgcagcagtctgagatagatctgcgaggctgcaggctggtggggagaggggtatccgccattgctgaggtttgattaggtaaacaaagcggccaggaaactcaaactgggtggagcccactgcagctcagcaaggcctactgcctctacagactccacctctgtgggcagggcatagctgaataaagggcagcagaaacttctgcaatcttaaacgtccctgtctgacacctcggaagagaacagtggttctcccagcacggtgtttgagctctgagaatggacagactgcctcctcaagtggatgtctgatccctgtgtagcctaactgggagacacctcccagtaggggctgacagacacctcatacaggcgggtgctcctctgggacaaatctttcagatgaaggatcaggcagcaatatttgctgttctgcaatatttactgttgtacagcctgtgctggtgatacccaggcaaacagggtctgaagtggacctccagcaaactccagcagacctgcagctgagggacctgactgttagaaggaaaactaacaaacagaaaggaatagcgtaaatatcgacaaaaaggacatccacacccaaaccccatttgtaggtcaccaacatcaaagaccaaaggtagataaaaccacaaagatggggagaaaccagagcagaaaagctgaaaactcaaaaaaccagagtgcctgttctcctccaaatgatcgcatctcctcaccagcaacagaacaaagctggatggaaaatgacttcgatgagttgacagaagtaggcttcagaaggtcggtaataacaaacttctccgagctaaaggagcatgttctaaaccattgcaaggaagctaaaaaccttgaaaaaaggttagaggaatggctaactagaataaacagtgtggagaataccttaaatgacctgatggagctgaaaaccatggcatgagagcttcgtgatgcatgcacaagcttcaatagccgattcgatcaagtggaagaaaggatgtcagtgattgaagatcaaattaatgaaataaagcaagaagacaagattagagaaaaaagagtaaaaagaaatgaacaaagcctccaagaaatatgggactatgtgaaaagaccaaatctacgtttgattggtgtacttgaaagtgacggggggaatggagccaagttggaaagcactctttaggatattgtccaggagaacttccccaacctagcaaggcaggccaacattcaaattcaggaaatacagagaacaccaaaaagatactcctcgagaagagcaacccgaagacatataattgtcagattcaccaaggttgaaatgaagagaaaaatgttaaaggcagccagagagaaaggtcgggttacccacaaagggaagcccatcagactaacagcggatctcttggcagaaactctacaagccagaagagagtgggggccaatattcaacattcttaaaggaaagaattttcaacacagaatttcatatccagccaaactaagcttcataaatgaaagataaataaaatcctctacagacaagcaaatgctgagagatttttgtcactaccaggcctgccttacaagagctcctgaaggaagcactaaacatggaaaggaacaaccggtaccagccactgcaaaaacatgccaaattgtaaagaccatcaatggtatgaagaaactgcatcaattaatgggcaaaataactagctaacatcataatgacaggatcaaattcacacataacaatattaaccttaaatgtaaatgggctaaatgccccaattaaaagacacagactggcaaattggataaagagacaagacccatcagtgtgctgtatttaggagatccatctcacgtgcagagacacatataggctcaaaataaagggatggaggaagatctaccgagcaaatggaaaggaaaaaaaggcaggggttgcaatactagtctctgataaaacaggctttaaacccacaaagatcaaaaaagacaaagaagggcatttcataatggtaaagggatcaattcaacaagaagagctaactttcctaaatatatatgcacccaatacaggagcacccagattcataaagcaagtccttagagacctacaaagagacttagactcccacacaataataatgggagactttaacaccccactgtcaatattaaacagatcaatgagacagaaggttaacaaggatatccaggacttgaactcagctctgcaccaagcagacctaatagacatctacagaactctcccctctaaatcaacagaatatacactcttctcagcaccacatcgcacttattccaaaatggaccacgtagttggatgtaaagcactcctcagcaaatgtaaaagaacagaaattatgacaaactgtctctcagaccacagtgcaatcaaactagaattcaggattaagaaactcactcaaaaccgcacaaccacatggaaactgaacaacctgctcctgaatgactactgggtaataatgaaatgaaggtagaaataaagatgttgtttgaaaccaatgagagcaaagacacaacataccagaatctctgggacacatttaaatcagtgtgtagagggaaatttatagcactaaatgcccacaagagaaagcaggaaagatctaaaatcgacaccctaacatcacgattaaaagaactagagaatctgcaagagcaaacaaattcaaaagctagcagaaggcaagaaataactaagatcagagaagaattgaaggagatagacacacaaaaaacccttcaaaaaaatcaatgaatccaggagctgttttttagaaaagatcagcaaaattgatagactgctagcaagactaataaagaagaaaagagagaagaatcaaatagacacaataaaaaatgataaaggggatatcaccaggaatcaaataatcaaatagacacaataaaaaatgataaaggggatgtcatcaccagtcccacagaaatacaaattaccatcagagaatactataaacacctctacacaaataaactagaaaatctagaagaaatggatgaattcctggacacatacatcctcccaagagtaaaccaggaagaagttgaatctctgaatagaccaataacaggctctgaaattgaggcaataattaatagcttaccaaccaaaaaaagtccaggaccagatggattcacagccaaattctaccagaggtacaaagaggagctggtaccattccttctgaaactattccaatcaatagaaaaagagggagtcccccaagaattttaaaccaatatccctgatgaacgtcaatgtgaaaatactcagtaaaatactggcaaaccaaatccagcagctcatcaaaaagcttatccacaacgatgaagtcagcttcatccctgggatgcaatgctggttcaacatatacaaatcaataaatgtaatctatcacataaacagaaccaatgacaaacaccacatgattatctcaatagatgcagaaaaggccttcaacaaaattcaacagcccttcatgctaaaaactctcaatcaactaggtattgattgaacatatctcaaaataataagagctgtttatgacaaacccacagccgatatcatactgaatgggcaaaaactgggagcaatccctttgaaaactggcacaagacagggatgccctctctcaccactcctattcaacatagtgttggaagttctggccagggcaatcaggcaagagaaagaaataaatggtattcaattaggaaaagaggaagtcaaattgtccctgtttgcagatgacatgattgtatatttagaaaaccccgtcatctcagtccaaaatctccttaagctgataagcaactttagccaagtctcaggatacaaaatcagtgtgcaaaaatcacaagcattcctatacaccagtaacagacagagagccaaatcatgagtgaactcccattcacaattgctacagagaataaaatacctaggaattcaacttacaagggatgtgaaggacctcttcaagaagaactacaaaccactgctcaacaaaataaaagaggacacaaacaaatggaggaacattccatgctcatggacaggaagaatcaatattgtgaaaatggccatactgcccaagataatttatagattcaatgccatccccatcaagctaccaatgactttcttcacagaattggaaaaaactactttaaagttcatatggaaccaaaaaagagcccacatagccaagacatcctaagcaaaaagaacaaagctggaggcatcatgctacctgacttcaaactatactataaggctacagtaaccaaaacagcatggtactggtaccaaaacagagagatagaccaatggaagggaacagaggcctgagaaataacaccacacatctacaaccatctgatctttgacaaacctgacaaaaacaagaaatggggagaggatttcccatttaataaatgttgctgggaaaactggctagccttatgtagaaagctgaaactggatcccttccttacacctgacataaaaattaattcaagatggattaaagacttaaattttagaacgaaaaccataagaaaccctagaaggaaacctaggcattaccattcaggacataggcatgggcaaagactttatgactaaaacaccaaaagccatggcaacaaaagccaaaatagacaaatgggatctgattaaactaaagagcttctgcacagcaagataaactaccatcagaagagaacaggcaacctacagaatgaaagaaaatttttccagctacccatctgacaaagggctaatatccagaatctacaaagaacttaaacaaatttacaagaaaataacaaccctatcaaaaagtgggccaaggatatgaacagacacttctcaaaagaagacatttatgcagccaacagacatgtgaaaaaatgctcatcatcactggtcatcagagaaatgcaaatcaaaaccacaataagataccatctgaatggcgatcattaaaaagtcagaaaacaatagatgctggagaggatatggagaaataggaacacttttacactgttggtgggagtgtaaattagttcaaccattgtacaagtcagtgtggcaattcctcaaagatctagaactagaaataccatttgacccagcgatcccattactgggtatataaccaaaggattgtaaatcatgctactataaagacacatacacatgtgtgtttattgcagcactattcacaatagcaaagacttggaaccaacccaaatgtccatcaatgatagactggattaagaaaatgtggcacatatacaccatggaatactatgctgccacaaaaaaggatgagttaatgtcctttgcagggacatggatgaaggtggaaaccatcattctcagcaaactatcacaaggagagaaaaccaaacaccacatgttctcactcataggtggaaattgaacaatgagaacacttggacacagggcggggaacatcacacactggggcctgtttgggggtgggggatggatagcattaggagaaatacctaatgtaaatgacgagatgatgggtgcagcagaccaacatggcacatgtatacctatgtaacaaacctgcatgttgtgcacatgtaccctagaatttaaagtataataataaaaaagctctaattaagtggcttaaagaaaaataaaagcaattaaatcaaatactttgtcagaaaaaatggaaagactagtcaaatgctttttcaagtttatgtgacttaagtaaaatctttaataaataagctgtctttaaaattattggtaaagtaatattagaaatgtcttaagaattgccagcatgcatttttgtttgtatttattgttcaagcaatttcacacttatccctgccaaatactataaggtgtcaaaattttggtataggggttacaaaactataaatccagtcccaaacagaatgatctttgcttgtataatttttaataaagaagacattgacattggtctaatgaagatagctacatcttgaattatttactaaaataccgtaacctctaatcttgtggctttaggcagtctagtgtacaggcaggaaggaggtctgttttgggaaaggactgttattgtctttgtttcaaagctgtattaatcagggttctttagagggatagaactaatggaatatataaatatacatatatttatataatatatatatttatatatatgtaaaggggagttaatattaagtgttaactcacacaatcacagggtcccacaataggccatctgcaggctgaggaaaaaggagggtcagttcgacttccaaaactgaagaacttggagtccaattttcaagggtaggaagcatccagcacgggagaaagaagtaggctgggaggctaagccagtctctctttttacatttttctgcctgcttctattctagccgagctggcagttgattagattgtgcccacccagattaagggtgggtctgactttcccagctcactgacttaaatgttaatctcctttggcaacaccctcacagacacaccgaggatcaatactttgtatccttcaatccaatcaagttgacacttagtattaaccatcacaaaagctgaagtataaactaagatcctcccaaagttagttttgcctatgcccaggaatgaacaaggacatcttggcagttagaagcaagatggattaaatcatatctttttcactgtctcagttataattttgcaatggcggtttcataactttaaatgatgactattgcagttttcataaataatctaggtaaacaaaataaaataattaggtaaatgtaatggcagaaatacttgtagacaaacttgtcataatttagaatctaaacttatgttaaataatagatatttcattatttgggtattttccaataaaaatatatggtaggaaaacattccttcttaaaaaaagatttgttttgaaaaaggagaataatttttgtctaattcaatgcttatttaaaggttatgtataagcaaggtaaaaggaaccaggaaataagagagatgtaaagaaagttatagaaataaaggcccggcacggttccttacgcctgtaatcccagcacttcgggaggctgacacaggtgaatcacttgaggccaggagttcgagaccagcctgggcaatatggtgtaacctcatctttactaaaaatacaaaaattagccagatgtggtggtgtgcacctgtaatctcagctactcgggaggctgaggcaggataatcgtttgaatcccagtggcagaggttgtagtgagctgagattgtgccgctgaattccagccttggtgatagagtgagaccctgctcaaaaaacaaacaaaaagagaaagttatagaaataaagaggtattttttggtaggaaagcttaaagagaaatgattttttttttcttttcagacagagtctcactctgtcgcccagctagagtgcagtgacaaaatttggctcactgcaacctgtgtctcctgggttcaagcaattctcctgcctcagcctcccaagtagctgggattacaggtacatgccaccatacccagctaatttttgtatttttagtagagatggggtttcatcgtgttggccaggttcgtctcaaactcccaagctcaaatgatccacctgcctcagcctcccaaagtgctgggattataggtgtgagccaccatgcccagccaagagaaatgatttcatatgagaaagaatcttgtatggtaaatttagtcctagaataaaatgactggtcgtttaagaaagagagatgttcaggccgggcgcagtggctcatgcctctaaatgccagcacttcgggaggctgaggcgggtggatcacctgagttcaggagtttgagaccagcctggccaacatggtgaaaccctgtctctactaaaaatacaaaaaattagctgggtgtggtggcatgcgcctgtactcccagctacttgggaggccgaggcaggagaattgcttgaacctgggaggcagagattgcagtgagctgagattttgccactgcactccagcctgggcaacgagtgaaattccgtctccaaaaaaaaaaaaaaaaaaaaaagagagagatgttcaggacaaaccagaaagtcccagcatgtcatggatcctctatatgagtatttttaaaaaataccaaaagcatttatatgatcaagttgtctataattaaagggaaaatataatggcctttctagagattgggtttgatattaaaaaaaaaactcttatacactaaaaaattggttagaacaataaattttttttttttttttttgagacagagtctcactcttttgcccaggctggagtgtagtggcacaatcttggctcactgaaacctccgcctcttgggttcatgtgattcccctgcctcagcctcctgagtagctgggattacaggcacttgccatcacacccagctaatttttgcatttttagtagagacggggtttcaccacgttggccaggctggtcttgaactcctgacctcagatgatccacccaccttggcctcccaaattgctgggattacaagcatgagccaccgtgtctggccagaacaatgaaattttcttaagggattgatttattcttaagagattttaatttttttaacccaaagttcaacttttattgcatcttgccatttttggttttctctccccctttaaaaggcatgaaataataacactcttcttcaaaccattttcagcttaagttttttccgcccccctcaggttctgtttgttgtggccttatgccaacaatgtttccttaaaggtctaaagcaaatgttttcttccaacataatattctgtgcagtgcagaaggtcttttcttttgccttttggtaactggcttaacagattttatgtgttattgaaataattcgcatgccattattattaagttttggtttgattagaaaaaaactgagattaaaaaagtttttttttttttttttttgagacagagtctcactctgttgccaggctggagtgcagtggtgcgatcttggctcactgcaacctccgactccctggtttattgattcttttgcctcagcctcccgagtagctgggattacaggcatgggccaccacatccagctaatttttgtatttttagtagacatggggtttccccatgttggctgggagatcttgattcctgacctcgtgatctgcccaccttggcctcccaaattgccgggattacaggcgtgaaaagtttttgttaaaattaagattattggctgggtgcagtggctcacgcctgtaatcccaggactttgggaggctgaggtgggtggatcatgaggtcaggagtttgagaccagcctggccaatgtggtgaacctctgtctctactaaaaatacaaaaattagccgggcctggtggtgtgcgcctgtaatcccagctacttgggaggctgaggcaggagaattgcttgaacctgggaggcagaggttgcagtgagctgagatcatgccactgcactccagcctgggcaatagggcgagactctgtctcaaaaaaattaaattaaattaagattattacacctgtgtatctttctgtatgtgcttttaaagtccttgtgacattgagttacagggctttgacacctgggtctaaaaaggacaccaggccaggcacagtggctcacacctgtaatctcaatattttgggaggcctagacaggtagatcacctgaggtcaagagtttaagaccagcctgccaacatggtgaggccccatctttactaaaaatacaaaaattagctgggtgtggtggtgtgcatctgtaatcccagttatttgggaggctgaggcaggagaattgcttgaacccaggaggcggaggttgtagcgagccaagatcgcgccattgcactgcagcctgggcaacaagggcaaaaccctgcctcaaaagaataaaattaaacaaaaaataaaaagtacactatgtctttgtaaatcttaaacactggcaataattaagccctcgtcttctggcctggtagaagatgccaatcaaaataaactgtgttcctgagacacagggccagaaattaaagttattcaactcctcagggcccaggggctattgtggaaaaggtaggtgcatgagattataagggctgattttgagagagaaaataagttcagtttctctataaattaaccattaatgtgaaaggtacactgatgcaagaccagcatatgggcccctttgtcagattaacaatattttcttgaagcattaactgacttcttaataaaacttacaacgattgtaaaaggcttattcatgttatatcttatggtcaatattaaaattctataatttataacaatttgaaaaactaattgtcttcatgttctttttattagggcttattgtttggaaaattaagtttcttgaagaccgaaggtttttgactttttttgaaatccttgagttatcagtttggttaaatgaatgacttattttacaatgacctgtgatcctattttgtgatatcaagtgttttaaacctctgatatctgacgaactttccaaaatcaaattataaattatgactttttctgacataaatattcctttaagatattcctttccctaaagtccaaaaatgacataatttggcttatttggcataaaaattatacaggaagccttgtcaaatatgaaatggtttttggctttctttgggctgtatttgtatattattggtatgtgttccaaaattatgggaaactcctataattctgattgacttagtgtatgttatcaggaataattataattgttatgttaaattattatgtgccacagaggtaattccttgtcaattgtgtctttgactatggctgccttaaaactttttgccatccacagacaattgttgtcttgttttggtcctctttaggaagtggttttatagctgattagctataaaactctaacaggtgctcttgaatgcaggtttctgattactttggagattgtgacatcagaatagaggaaaaatggcaggactcatggagagctgaaatatttatgagtattaagcagaacaggaattaactgagtggactgaactaatagaagactggagtaatctttttagtttttgcttaaaatgttgctgatcctttgttttgtttttcagagtaaaggaaacttcttttgggctagtgtttaacaattaagtaaagtatactcctataaacaaaatttagagcatatttgcttcttgctacctgatttctccagaatttggaaactttttgagagtattcctaacttatggccatatagttatttgcataagtgcaataagaatctgttttcatttgtaacaggacagaattggagaaactggttgttttaccaaaggcttgactggaatggcgtgcttttctttaaggaatcaaacttgacttatagagccaataaaaaccccttagaagaaaactggctgcataccatgcctacacagttcctgaatagggttcctgatctgtggtaagtaaagaatatcactttctgacaggcccaggagccccaagttatcttgggacctcaagaagagacgaatttactcaactcataggtattcgatggtacaaatccatgactggacttggctttaaaaagtcttatctgagattccttctgtggaacaaagttccatcaaagccaattttaaaagcctatgtgaaaaataattattcttgcttcactttatagaaatagtctagccaagtataataaagcaaattggtcctatgattatttgtcttttgtaaaaattggtaacaggagagagaaaaattatatttcaaaaactataatacatctgttgttagattctagtcttgcctaatatttttcagtttttattattttctacagtttggactcaattctaatttttcctggctacaagtctccaaaataatgttttccatttttttcttttttcttttccttcccccccccgcaccattttcctaacgtgaaataactgaaaactaagctgtgctttcttaaaactctgcaaactgaagctagacaacttaaacatcagaagaaaataacagcaaccatatacatatgtaagccactttcttacctgcttgtatggacttcagaataatgtggcctatatcaattttccaggattgttcttttgttttttgttgtttttcacgattcctccccctattttctcttcctaggacatgagacttcccagcctgctaaaggtgaactttcctgataacttgggacctaccatctaggaataaactgtcctagccatgagagatcagatgaaacctgagaccagagattcatttccttctaatatgctttctcccaaagcttttcaaaagaaaaggggggaaatgtgaaaggaaaaaaaatcttggggcccccaaatcactaagctaaagggaaaagtcaaactgggaaccacttagggcaaacctgcctcccattctattcaaagtcatccctctgctcactgagataaatgcacatctgattgcctcctttggaaaggctaatcagaaactcaaaagaatgcaaccatttgtctctcaccgacctgtgacctggaagccccctccctgcttcaagttatcctgcctttctggacagaaccaatgtgtacctcttacatgtactgattgatgtctcatgtctctctacaatgtgtaaaaccaagctatgccccaatcaattagggcacatgtcgtcaggacctcctgaggctgtgtcatgggtgtgcatcctcaactctggcaaaataaactttcttttcttttttttttttttttttgagacagagtttcactcttgttgcccaggctggagtgcaatggcatgatgtcggcttaccgcaacctccgcctcctgggttcaagcaattctcctacctcagcctcccgagtagctgagattacagacatgcaccactacgcctggctaattttgtatctttagtagagacagggtttctccatgttgaggctggtctcgaactcctgacctcaggtgatccgcccgcctcagcctcccaaagtgctgggattacaggcgtgagccaccgcacctggccggcagaataaactttctaaattaactgagacctgtctcagatacaggcagacatcagtgtgtatacatgtaaggtatacattggttcggtctggaatgcctggacaacttgaagggctggagggtttctagcttgtaggtggattcaaatattttctagcttgggcgtggtggcttatgcctgtaatcccagcactttgggaggctgaagtgggaggattgcttgagcccaggagttcgagaccagcctaggcaacatagtgagaccttgtctctacaaaaaattttaaaaattagccatgtgcagtggtgcatgtctgtagtctcagctatgtgggaggtgggaggatagctcgatcccaggaattcgaggcttcagtgagccactgcactccagcctgggtaacagagtgagctcttgtctttcctcctgcactgttagaaataaatttatggtgccgcaaaagaaatagcactcgaacatgaattttctcagcaaggcaattttacttctatagaagggtgcgttttgcagatggagcaatggcgagagcacaagggagtggaaggggttcttatccctgacacaggtagcccctactgctgtgttgttcccctttggctagggttggatcacacagtctaagctcattccagtgggctattttaaagagagcaggggtatgagctggagtggcagggagagtagtttggcaggaaggacagttacagaacaggtacaagatgactaagaacagagcaggtgaccaaggatgactaaggtcggagcaggtgaccaagggtgactaaggtcagagcaggtaatagaggctaggagggggttgtttactgaaactagggacaaggagatgtaaagaatgaggaagttaagctttaaaatgaggaacaaagaacaggggagctgaacatactgatacattggttctttggagaggatctcagaactcattgtacttaacaatttataggctaacacctttgaagaagcattattatatcctacatgtaccatcccccctgcaaaaaaaaaaaaaacaaatattttctgattggcaattggtcgaaagagttaagttattatctaaagacctggaatcaataaaaaggaagatttgggttaagataagaggttgtggaaaccaaagttcttattattgcagatgaagcctccaggtagctggcttcagagagaatagatggcaaatgtctcttatcagacctaaaaagctgccagactctcaattaactatctcctggatcagaaaagaccaggaaagggaaggggattctctacagaatatggatttttcctacaagagagagctttgcagggccatttcaaaatatgtcaaagaaatatatttttgggtaaaatactttgaattctttcagggcctgctatctgtcatgtgatgctatattagggtcaggttggaatttggtatcttactgctacaaagagtctgttttgtcagtcttaatatctctgtttaatgataatgctgatcagttgtgcctgaattccaaagggaggagggtataatgagggatgttcgacttcccttcctatcatggcctgaactagtttttcaggtttattttggaaatgcccttggccaagaggcagcagtccattcagtcagttgaggggtttagaattttatgtttggtttacagagtaaatatgaggtgagggctaaaagcacattttctgagtcccaaatcaagatacatgggctaactagggatttttgtgccattttcagatgtgagacgctgtcttggaggcatggtatgaatgtagacatgatgaaaattccgaggtattttgatggtttttggacagcaagtcagaatatttggaattgggactatttgggggtttaaattgtaaagaagagcttgagagggaatgttgaggcacaaggacagattaactataggtagctgtagacaaaattcaagtcagttttaaaaatgatgagttgaaaataaaccatgaaactgaattagccagcagccggcaaatgcattttctcattgacacctaagcagtgataaaattccctcattgtagatcctacctcttcttcagaaagcatatataggcttgcctatatgctttctgtaaaataaaatcaaattcccaaaagttccagtaaggttatatgctgttatttttatatacctcctgttctcccccaaactcttgcttcctcaaatgcaacatcttccttctgttgccctcatctggattttcagatcatccatccacccacccatccctcctcccatccacccaatgagaatcaatggacttcctgtggatgttaggcactatgtggttcacgctggattcccagcactcacagaggcaaagtcatggattagttaattacaagttggacaaacatgaccaaaagagaaaggcatagtgctttgggagcatagggcaaggaaacaggacctggtctgaagggtcctggaagtcttcctgaggaagccatgtttaagctgagttcagaagagtgagtagaagttggccaggagtatttcatgccagcgccttcccctcaccccatttctccccaagcctgctctcccttgtcctctggaattccttgtcctactgtgaaagctccctgtgcatttattgactgcttctctttttccagccctgggttcttcctgaagctcctgggtctccagtgggtgtctgctctttgatggttctgcccacctccccatttcagtttggcaatagaatgctcctgtgggctgggtgtggtggctcacacctgtaatcccagcagtttgggaggccaaggtgggcagatctcttgagcccaggagttcaagaccaacctgggcaacatggtgaaacctgtctctcagaaaattagccaggtgtgggtggcccactcctgtagtaccagttaatctggaggctgagcccaggaggtcaaagatgcaatgagccgtggtcctgtcactgcacttcagcctgggtgacagagtgagaccctgtttcaaaaaaaaaaaagaaaaaaatgctactgtgactcttccttcttacacaatgctctaatatgacttttaaaggacacggtaatcattttgtcttatttccatggggtaatcattttgtcttttaacttttcttatcatagaattgctacattgataaggcgtttagcactgggtcccacacagggtaagttcttgatatgtattattacccctactatgatttttaaaagactctgaccgtacattgtatgtaacaggcacttcataactgcttactcatcttcccttatcccagtgcccatgggccagttaaggcagagaagatagggttgtaggaatcaaatgtttattgagtaccttagaagtcatcctgacagtgagaaggctttgtccaaggttaaacgacttgttaattaatgttagagctggactttggatccaggtcttcatacttgagcataggtgtcctgatttgtattttaatgctctttctatgacagtaccccatgctcttccagtctctttgtggagtccctgtcttttatcactagaaagtgacaaaggccttgactctgtgctcaaaagtctttttttgtctcctctgcaaaaagtggactctctcatgcaatcctagaaactggaaattctctctagagagcatgcgtggctgtctctcagggatggggtgggagttgggggaggatataatgccccctcctgctacttagcagagtctgtctcgtctgagtgagcatttggaggacttttatcatggaatcaccctacattcctcaatctttgcttacaagtgcccttgaagcatccctctgcttcacttttggaggaattgagttataggtgacagttcatacctactgccaccttctgttgtagagtgttaagtacacaaggtctttctagagatgtgctctaggaggcagtatggcatcagagttaagaacacagaacctggagtcagtctacttgggtttaacgtcagccttaacttgggcaaattatttaaactctccaagtctcagtttcttcactgagggacaacaatcaaagctacttcagagggctgatggaggattaaaaggtgctacgacatataaagcacatggcccactgcctggcacatagcaagcattcaataaatgccagctgttattattttctcatctgatacctacagcagccttgggagataggcagggcaggtgttattaacccttctatacccctgggaaggctgagtttcagaaatgttaaatgacttgatctgaggtcacagagccagtgaatggcagtcaggaccccaggtggtctgactctgagttcagtgctccttctccctctgagtggcctctgaaatgaatggtatttcccttggggacctgcctgaccaactttcatgtttgtgaattctctttccttccagcttctcctccttttgtcagaattctgcctggtgatagtttccagaaacccaccagtcaaaacgctacctgtttctgtgaggccaggatgcaggcctctcaggaggattcaggagggctactcagtctctggaaggctggagggttcctgctcatgcagtgagtacattgagccttcagctgggagttaacttagttgtctgttgggtggaattaccttgagtcccttcaacttgaaagaaaacctaacatatatttgtgcatttgaaaattgcagaatgatttaattttatatcaagtattgtaatatatatgatattactggaaagatactaatgagtttttacttgcattttatacaaaggataacttcttattcaaggcctctgggcctcttgcttttacacattaccaagaacattccattttgttcaataaaagcattgatttcatccgtctttgttgtccgataggttggcagggtagggctattgcttgcttattttcttacctctggagtattcacttctgaaatgaaggggtgtttcacttgtggactgggtgatgctgggtaagttgctgaacgtctctctgggcctcaggtgccacatctgaaatgatgattcttatctcacagacctgtgtaaagggttcaagcactgtccctgacacttactaggggcttggtcagcctgagtttatcttatgtgtttatctttgtccttcacatttatccatccacagtaacattaatgacttcatttgctccaaacccatgaggcacatgggaccagtatgaatttgaaatagaaaaggatatggctaaattgccttataaaaacctttatcagtttatactaccatcaactctgtgagtgaaagttcccaatttacttaagaatacttcaactttttattgaaaaataaaacacagatacaaaaacccacacctaacaaatgcacggcttaatgaattattgtgaatgccacgtgagttaagaagtagaactttgccacccaccccagaacctgtgcccctttccctcatcccaattgcctacccctctctctctataagtagtcactttcttgacctttgtagtaatcatttactttttaaagtttttttaaagatccaaatgcgcatctcaagatactctagtcttgctcattaaaaaaaagtgataattttttaaagccgcgattattcagtaaattcttcctccatccctcttttttttctttccaatttgcctgtagaagaattcaggccttttggcttgtagagtttcccatagtctgggttttgctgactgcatactcatggtgcagttaagcatgttcctcagtcctctgtgttttctacaaattggcaggtagttcagagactggattagaactcaggttcagtttctttggcaagattgtaggtggtgttaggcatgattataggaagtgcataatatctaatggtctctttttatgtttgtaaccattcatacgtactttattgagggctgcagaatggtgatattctatcatttcttttccatttattagttgggatacttttataaagggaaacttacccttgtttattatttgtttacccagtggtgcagttcctatgggaaaggctggattaatgctggagttttccccctttacataccagttttcaagacaatgaattaattccctatcatcctctgagggtgaccaatcattttaaaaaatatcattatgaatccataggtttaaatatatttgatggttttagtctattgcaagcttatccagcatgtggcccacagtctgcatgcagcccagatagctttgaatgtggcctaacacaaatttgtaaactttcttaaaacattatgagattatttttgcaatttttttttaagttcatcagttgttgttagtttattttatgtgtggcctaaaacaagtcttcttccagtgtggcccagggaagccaaaagattggacaccccggtctattgcaattattatcatcattgaagctcaagttgtcccccatctttggtcagtggaagcttcttcaggtttgattctaagtccttttgacatgatcatagtgtttttttatagtttccttattatttggcatgaagaagtgttccaggctcatctcatatatatcctgctccagacataaaatgagccatttctctgagaatcactggtttctttggataagaaatttgtgatggttaatattgagtgtcaacttgattggattgaagaatgcaaagtattgttcctgggtgtgtctgtgagggtgttgccaaaggagattaacacttgagctaggggactgggagaggtggacccaccctcaatctagatgggcacaatctgagctcaatctaatcagctaccagcgtggctagaataaagcaggcagaagatggaaacagcagacttgctgagtcttctggccttcgtctttctcctatgccagatgcttcctgccctcaaacatcggatcctgagttctttagcttctggactcttggacttacacgactggtttgccagggctttcgggccttttgccacaggctgaagattgcgcttttggcttctctacttttttttttttctttttttgagacagagtcttgctctgtcagccaggctggagtagagtggcacaatctcagctcactgcaacctccgcctcctgggttcaagcaattctcctgcctcagcctcctgagtagctgggattataggcttgtgccaccacacctggctaatttttgtatttttagaagagacaaggtcaggctgatcttgaactcctgacctcaggtaatccgcccgccttggcctcccaaagtgctgtgattacaggcgtgagccaccgcgcctagccggcttccctacttttgaggttttggggctcagctggcttccttgctcctcagtttgcaggtggcctgttcacacttcactttgtgattgtgtgagtcagtaccccttaataaactcccccttatatatacatctatcccattagttctgtccctctagagaatcctaatacaaaactatacatcaagaccacaatctgctagtgatgatcattactactgaggttgggccttatttctagaccttttcaataaacatttagaactggggggacttgaggtaagggatttattgcatgttgataacatttgtctgtgccttttacaattgaagatcagttttactggatataaaatccttggctctttctttccttgggcatcttaaatatgtgaattccatttcctttaccataaaatattgctgttgaagagtctgataattagctgaatttctttcccttcttaaatcatgtactttaattttctttatagctaaagacgttatttaaagtacagtaattttactagaatgtcttggtactggttattctgggtaaatatcctcagggatgaggtccgctcttttaatatgaagtctggaatctttttttatttcaggaaagttttcttgaattatagttttagtgtctgttctgttcccttcttgtggttttttttaggaactttattatctgtatgtatgatcttctttgcctgccttcaatatttgtcagtttctcttcagttctttttatctcttcacttttatttgttaagatttttttcctgtttttcacctgtttctctctctctctctctctctctctctctttttcctgaatagagatggggtctccttctggttcccaggctggtcttgaactcctgggttcaagtgatcctcccgcatcagcctcttaaagtgcggggggttacaggcatgaacttcacctgtttctcttaagaaacatgtgtttattgaccctgtctgacatttctgaagagagcagtggttctcctggcatggggtttgagctctgagaatggacagactgcctcctcaagtgggtccctgactcccatgtagcctaactaggagatatctcccagtaggggctgactgacacctcatacaggcgggtgcccctctgggatgaagcttccagaggaaggatcaggcagcaatatttgctgttctgcagcctccactggtgatatccaggcaaacagggtctggagtggacctccagcaaactctaacagacctgcagttgagggacctgactcttagaagaaaaactaacaaacaggaaggaatagcatcaacatcaacaaaaaggacatccacaccaaaaccccatctgtaggtcaccagcatcaacaaaaaggacatctacacccaaaccccatctgtaggtcaccagcatcaaagaccaaaggtagataaaaccacaaagatggggagaaaccagagcagaaaagctgaaaattctaaaaactggagcgcctcttctcctccaaaggatcgcagctcctcaccagcaacggaacaaagctggatggagaatgactttgacgagctgacagaagtaggcttcagaaggtcggtaataacaaacttctctgagctaaaggaggatgtttgaatccatcgcaaggaagctaaaaaccttgaaaaaaggttagacgaatggcaaactagaataaacagtgtagagaagaccttaaatgacctgatgaagctgaaaaccatggcacaagaactatgtgacacatgcacaagcttcaatagctgattcaatcaagtggaagaaagggtatcagtgattgaagatcaaattaatgaaataaagcaagaggagaagtttagagaaaaaaagaataaaaagaaacaaagcctccaagaaatatgggactatgtgaaaagaccaaatctatgttggactggtgtacctgaaagcgacggggagaatagaaccaaattggaaaacagtcttcacaatattatccaggagaacttccctaagctagcaaggcaggccaacattcaaattcaggaaatacagagcataccacaaagatactcctggtgaagaacaaccccaagacacatgattatcagattcgccaagggagaaatgaaggaaaaaatgttaagggcagccagagagaaaggttgggttacccacaaagggaagcccatcagactaacagtggatctcttggcagaaagtctacaagccagaagagagtgggggccaatattcaacattcttaaagaaaagaattttcaacccagaatttcatatccagccaaactaagcttcataagtgaaagataaataaaatcctttacagaaaagcaaatgctgagagattttgtcaccaccaggcctgccttacaagagctcctgaaggaggcactaaacatggaaaggaacaaccggtaccagccaccgcaaaaacatgccaaattgtaaaaaccactgatgctaggaagaaactgcatcaacgaatggacaaaataaccagctaacatcataatgacaggatcagattcacacataacaatattaaccttaaatgtaaatgggctaaatgcctcaattaaaagacacagactagcaaattggataaagagtcaagacccatcagtgtgctgtattcaggagacccatctcacatgcagagacacacataggctcaaaataaaaggatggaggaagatctaccaagcaaatggaaagcaaaaaaagccaggggttgcaatcctagtctctgataaaacagactttaaaccaacaaagatcaaaagagacaaagaaggacattacataatggtaaagggatcaattcaacaagaagagctaactatcctaaatatatatgcacccaatacaggagcacccagattcataaagcaagtccttagagacctacaaagagacttaagactcccacacaatagtaatgggagaatttaacaccccactctcaacattagacagaccaatgagacagaagtttaacaaggatattcaggacttgaactcagctctgcaccaagcagacctaatagacatctacagaactctccaccccaaatcaacagaatatacattcttctcagcaccacatcacacttattccaaaactgaccacacagttgtaagtaaagcactcctcagcaaatgtaaaagaacagaaatcacaacaaagtgtctctcagaccacagtgcaatcaaattagaattcaggattaagaaactcactcaaaactgcacaattacatggaaactgaacaacctgctcctgaatgactatggggtaagtaacgaaatgaaggcagaaacaaagatgttgtttgaaaccaatgagaacaaagacacaacataccagaatctctgggacgcaattaaaggagtatgtagagggaaatttatagcactaaatgcccacaagagaaagcaggaaagacctaatatcaacaccttaacatcacaattaaaagaactagagaagcaagggcaaacaaattcaaaagctagcagaaggcaagaaataactaagatcagagcagaactgaaggagatagagacacaaaaaacccttcaaaaaatcagtgaatccaggagctggttttttgaaaagatcaacaaaattgatagactgctagcaagactaataaagaagaaaagagagaagaatcaaatagacgcaataaaaaatgatacaggggatatcgccaccgatcccacagaaatacaaactaccatcagagaatactataaacacctctatgcaaataaactggaaaatctagaagaaatggatgaattcctggacacatacaccctcccaagactaaaccaggaagaagttgaatctctgaatagaccaataacaggctctgaaattgaggcaataattaatagcttaccaaccaaaaaaagtccaggaccagatggattcacagccaaattctaccagaggtacaaagaggagctggtaccattccttctgaaactattccaatcaatagaaaaagagagaatcctacctaactcattttatgaggccagcatcatcctgataccaaatcctggcagagacagaacaaaaaaagagaattttagaccaatatccctgatgaacatcaatgcaaaaatcctcagtaaaatactggcaaaccgaatccagcagctcatcaaaaagcttatccaccatgatcaagttggcttcatccctgggatgcaaggctggttcaacatatgcaaatcaataaacgtaatccatcacataaacagaaccaatgacaaacaccacatgattatctcaatagatgcagaaaaggccttcaacaaaattcaacagcccttcatgctaaaaactctcaataaactaggtattgatggaacgtatctcaaaataatgagagctatttatggcaaacccacagccaatatcatactgaatgggcaaaaactggaagcattccctttgaaaactggcacaagacagggatgccctctctcaccactcctattcaacatagtgttggaatttctggccagggcaatcaggcaggagaaagaaataaagggtattcaattaggaaaagaggaagtcaaattgtccctgtttgcagatgacatgattgtatatttagaaaaccccatcgtctcagcccaaaatctccttgagctgataagcaacttcagccaagtctcaggatacaaaatcaatgtgcaaaaatcacaagcattcctatacatcaataacagacaaacagagagccaaatcatgagtgaactcccattcacaaagagaataaaatacctaggaatccaacttacaagggatgtgaaggaccttttcaaggagaactacgaaccttacccccaactccgtgctctctgaaacatgtgctgtgtcaactcagggttaaatggattaagggtggtgcaagatgtgctttgttaaacagatgcttctaggcagcatgctcgttaagagtcatcaccactgccttatctcaagtacccagggacacaaacactgcggaaggccgcagggtcctctgcctaggaaaaccagagacctttgttcacatgtttatctgctgaccttctctccactattgtcctatgaccctgtcaaactcccctctccgagaaacacccaagaatgatcaataaatactgaaaaaaaaaaaaaaaaaaaagaatgttgaatactggcccccactctcttctggcttctagagtttctgccaagagatctgctgttagtctgatgggcttccctttgtgggttacccgtcctttctctctggctgcccttaacattttttccttcatttcaactttggtgaatctgacaattatgtgtcttggagttgctcttcttgaggagtatctttgtggcattctctgtatttcctgaatctgaatgttggcctgccttgctagattggtgaagttctcctggataatatcctgcagagtgttttccaacttggttccattctccccgtcactttcaggtacaccaatcagacgtagatttggtcttttcacatagtcccatatttcttggaggctttgttagtttctttttattcttttttctctaaacttcccttctcgcttcatttcattcatttcatcttccatcgctgataccctttcttccagttgatcgcattggctcctgaggcttctgcattcttcatgtagttctcgagccttggctttcagctccatcagctcctttaagcacttctctgtattggttattctagttatacatttatctaaattttttcaaagtttttaacttctttgcctttggtttgaatttcctcctgtagctcgtagtttgatcgtctgaagccttcttctctcaactcatcaaagtcattctccatccagctttgttccattgctggtgaggaactgtgttcctttggaggaggagaggtgctctgctttttagagtttccagtttttctgctctgttttttccccatctttgtggttttatctacttttggtctttgatgatggtgatgtacagatgggtttttggtgtggatgtcctttctgtttgttagttttccttctaacagacaggaccctcagctgcaggtgtgttggagtttgctagaggtccactccagacgctgtttgcctgggtatcagcagcggtgtttgcagaacagtggtttttcatgaaccacaaatgctgctgtctgatcgttcctctggaagttttgtctcagaggagtacccggctgtgtgaggtgtcagtctgcccctactggggggtgcctcccagttaggctgctcaggggtcaggggtcagggacccacttgaggaggcagtctgcctgttctcagatctccagctgcgtgctgggagaaccactgctctcttcaaagctgtcagacagggacatctaagtctgcagaggttactgctatctttttgtttgtctgtgccctgcccctagaggtggagcctacaaaggcaggcaggcctccttgagctgtggtgggctccacccagttcgagcttcccggctgctttgtttacctaagcaagcctgggcaatggtgggcgcccctcccccagcctcactgccaccttgcagtttgatctcagactgctgtgctagcaatcagcgagactccgtgggcataggaccctcccagccaggtgcgggatttaatctcctggtgtgccgttttttaagcccgttggaaaagcgcagtatttgggtgggagtgacccgattttccaggtgccatctgtcacccctttatttgactaggaaagggaactccctgaccccttgcacttcctgagtgaggcaatgcctcgccctgcttcggctcacgcatggtgcgctgcacccactgacctgcgcccactgtctggcactccctagtgagatgaacccagtacctcagatggaaatgcagaaatcacccgtcttctgcgtcgctcacgctgggagctgtagaccggagctgttcctattcggccatcttggctcctccgcccctgtatttttttatatatatctgtttcttcctataagaatatcagtgtctcaagggtagggatctggtcctattcgtttttgaaactctctcacctagtattcattaataggactaagtgagaacagaacatccaagacctttaacaagggaccatcccttttgtgtttcctgatgttttaagagacaaaagtgcttttgcagctgtggcttctaagactaagagaagagattaaacaaagccaaatttactcaaagcacaacatatctgtgcatgtattcaggtctgtctctagcatcctagtcagaaaagcagtacctccctccatagtctgatacagatttcagacttgcatccccctaggacaataccacttgcaccattggaaaaatgcattattgctttctctagcagctgattaaattctagttccccatgatgcatggaacttgcttgaggactggtggagtacctggactatagacttcattctgaaatcccaccaactcccaaagaacccatcatacagcccatggtgcatgcacactccaggtaccactaccatatgactacaggcccaaccaccacctcttgaaagccagagtggacctacctctcttgaggctggccttgtagccaatctagttggcttctgtgtgttccatagccttgccatgtgccttggaccatgcaatattgatgatgatacaagtaatcctttagtgagcacttatcagtgtaccgggtgctgtgctaaatgtgcttcaaacaacatttcattgaactcccacgactcaatgaattcatttctattgcagatgaagcctctgagaagttaggtaatttttctctaggttacagtgcaagtaagtacaagagccaggactaaaactcaggcttgttagaagtgtccaaaatccatgttcctaatgacttgtagcatgagggttcccagaagctagctctgagatggagatttgtatgcaggagatttacgaggaatgtgcttcggatcaacacctgtggaaagaatgagttggaagcaggatggggcagatgaagaagctgagcactgatgaagtcccagtgaaagcctcagctagcccccagggaactctgaagctgggatggccctttagaatcatcctgttgtgatatagaagctggaaagaggagaaacctataaaataattaagaaacaattctatgtcatcactccagggaagctcgttaatttattcacttacttgcccactcattctttgattcactcattcattcattcagtgtgccagattcggtgctggattctgggggacaaggtacaaagtgaagtttacagtcaacacggagatgatgaacacatgagctagcagaacacagtcttacgggtgctcagatagagatgtgcacagggttccatgagagaatggacgtggggatgcactgaaagcaagtgggaggagccaggatgttgctgcctcctcagaggtgactgggctttcctagggcaggggaagaagggcattctgggcccaggggaaagactgagctttttagttttctccagatgggtttttttttttttttttttgagacagagtcttgctctgttgcccaggctggagtgcagtgtcacaatcttggctcactgtagcctctgcttcccaggttcaagcaattatcctgactcagcctcctgagtagctgggattacaggcgtgtaccaccgtgcctggctaatttttgtatttttagtagagatggggtttcaccatgttggccaggctggtctcaaactcctgaccttgtagatctgccttcctcagcctcccaaagtgctgggattacaggcgtgagccactgtgcccagtctcagatagggttatcttagttaatttgggctcctgtaacaaaagtcaagacagagtggcttgtaaacaacagacattgacttcttatagttctggaggctggaagtcagatcagggccacaacaactttctggttagggccctcttctgggttgcagactgctgacttcttatcctcacatggcagaaagagctagagagctctctggggtctcttttatgaggcactaatcccattcatgacagctccacccttatgacctaattactcccaaaggccccacctccattatccccttgggggttaggatttcaatatatgaatttttgggaaacacaaacatttagcccatgacaggggccaagggagtgaggtgggatcagaaaccaaggccctcagatgtgtgtgtggcagggagggtggtgggtaagaaactcatcagtgcggtttctgcacacgccctgtttatccaggccctttgattctccccaagagggaggagaccagcgaggagaccagcattgggcagaacagagaaaagaggtggcaaattattacccattaagttccagagccacagaagcagttataaagtagaaagatttgggaagaaggtgtgatcagcagaaagcagattttcttcctccccttctgctgggacagatgaagatgtggcgggcacgggggatggatgtaagagaagctgtggtagggagggctgactaggaaaaaatggatggtggggaaaacatactagttagctcttcaaaatttatcccagtgcagaggagtgcaggtgaacggacaggagataaagagagcagatgaatctcaggggccagggacaaaccagtagtcagggcagtgggagcctgacaccaaaggggtgtgtctctgccggggtctgtggacttcaggctggtgttgggtccaggagggtctgaccctgcagtggtggaccaaggtggggctgagggggtgaagggtgagagcacaggccttcaagaaggtaaagagtttgcccatggagaagaggacatagcggaatctacaagaggtcctatcagctaccccatgcttgcttctaggaacaaggacacgtggtcagaggcacaagggagtaattgtcagggatccaagtcacttgcagaggcctttctgaatggtgggttctgaggtggctgtatccaggtgtggcgtctccacccttggccttgcatggagaacccaggaagcgaagctacaagggcaaagcagaaggatggggatgtaggcagtgactgtgtccccctaaaattcatattgatgttctaatccctggtaccttggaatgtgaatgtatttggagatagggccactaaaaatgtcattaagataaaatgagctcatgtggtgggtcctaaccaatatgactggtgtgtttacaagagattaggacacagaaaacacacaggcagagagatgatcatgtggacacacagcaagccaaagagagaggccaccaaagaaaccaactctcagagttctagcctcccaatctgtgagaaaataaattctgttgtttaagccacccagcctgtggtactttgttatggcagacctggccaactgtgaacaatggccatttgatttcttctctcagtagattccaggcatgctgtcattgctttgcagatgcttactgagcacttgctgggtcctgcacccagctggctgctagggatagtgaggggcacgaggcactctctgcccttgcagagctcactggaggaataaacctttgtagaggaaggtttgatgggctttcctggaagaagtactcataggaaaacccaaaagctcaacagatgctgtctccttggttaacattaggagctatgatctccatcttcccatggcattagaggtttagatactgaggatcagagaggcaagttcagcatcagaaggcaggaagaggcagaaatctggacaccgattcctaactctaaagctgcgtcatctctagtgcatctcatcagctcttcccaatggcaccaatcaactttagcatactggccagccggaatagatgtccttgggcattcttaagatctgagactgtgatggttaattttagggtatcagcttgactgggttgaggaatgcctcagtggctggtggcgtccatcattcctgggtgtgtctgtgagagtgtttccagaggagactcacatgtgagccagcgggctgagaaggagacccgttctcagtgtgagtgtgcactgtccaatcagctcaaggccaggctggggacaaacaggcagaagaaggaggattctctctcccacctttctggagcaggatgccttttctccttggacatcagactacagggtctttggcttttggattctaggacttgtaccaatggcctcccggggccctcaggccttcagcctccaacgaaggtctgtgctgttggcctccctgattctgaggcttctggacttggactgaggcatgctacgggcttctctgattctccagcttgtggatggcctatcatgggacttctccacctctgtaatcacaagggccaatgccccctaatacctttcttttcatatatcctactggttctgtctgcctggggaaccttgactaatacagatatggagcatttgaaatgagaggatttctgatcctgttcttcaagaagcagtaggtcagagcatacctctttaaaataacttctggatagtttcacagttagaaagaatcagcttcaggtgatcttgaagatcccacttggattccactctccagctctcaggaagctctggcttccttacttcttctgggattttcctttcatgctggggagagatgctccctcaccactacccagcccatgggacacaccgagtctggtggaggatgctgtgacctgtggtgcttgtgattggtaagccttggggcacttgagggagggagaggagaaggtggctgcttgataagaaagatgagatgcatataattgccactgatatttgcagccgctgtaaatcccctcaaagagaccctgaatctctaatggggcactttcacagggagatgggatccagcttgattaatcaattgtggcttcattagtttctccctgatatttaatagtagttaaaacccagccctccaggaccgggcttaggccacccacaccaagaggaaaagtgtcagcctgggagggctcaagtcaacaagggacggggctggttttcctcctgttaggagcaaatctgttctcatgcttcattacttaatcagttgctacaagggaagattagatacaaagatagaggattaaacaaaaaacactggtagtaagacacttagaaagtaggggagagagagagctggcatttacagaacactcagatccctcctgagcttgaaccttctggattcttcctgaacatctctctgctatacatatatcacctcatttagtcttcatcaagagcctccgattattttatttatttatttatttatttgagacagggtcttgctgtcacctaggctggagtgcagtggtgtgatcttggctcactgcaacctctgcctctcagattcaagtgattttcctgcctcagcctcccgagtagctgggactacaggcgtgtgccaccatgccagctaaaatatatatatatatatatatatatatatattttttttttttagcagagacggggtttcaccatgttggccaagctggtcttaaactcccgacctcaggtgatctgcccgtcttggcctcccaaagtgctgggattacaggcatgagccactgcatacagcccattttattatttttcttttaatttttttgagacagggtctggttgtgtcatctaggctggagtgcagtggcacaatcttggctcactgcagcctctccctcctgggctcaggcgatcctcccatctcagcctccagagtagctgggaccataggcacatgccaccacgcttggcgaattttttgtatttttagtagagatggggttttgccatgttgcccaggctggtctccaactcctgagctcgagagatccatctgcctcagctttccaaagtgctgggattataggcatgagctaccacgtctggcctgattgttcattttagagagaagaaatggagacccagggagcttaaggattttgcttggctgcccaggtgtaaggattgtggaagtctaagtttatgttcttcatactcttccagtgcagcccaaacattcaaaatcaggggtcggcatactacagactgcaggctaaatccaccacactgcctgtttctgtgtgatctgtgatctaggaatggtttttacatttttttttcctctttttgagacggtcttgctctgtcactcaggctggagtgcagtggcacaacctctgctcactgcagccttcacttcctggactcaagtgatcctccaacctcaggccccgaagtagctgggactacaagtacacaccaccatgctcagctacattttttttttttttgtagagacaaggttatttttaaattgaatggcaaactatccattgagtataacttttttttttttttaaatacagcgtcttactgtgtcgcccagactgaagtgcagtggtacagtctcagctcactgcaacctcggcttcccaggctcaagcaatcctcctgcctcagtatcccaagtagctgggaaaacaggtgagcaccaccatgcccagctgatttttgtattttctggagagacagggtttcaccatgttgcccaggctggtcttgaactcctgggttcaagttatctgcctgcctcagcctcccaaagtgctgggattacaggcgtgacccaccacacccagcctacatttctttattttaaatatgtaatttattccacattctagatattatttccttactctggcttttgtttataagctgaatccctgaaacaaatggagaaactattccgtggataacagcacttctttaatttgaaagatataattttgcctatattctcaatattatttcctttctttggtattaaatataagttgaatactcggtacggagtaaggggcctaccacgtaataggtggtcaatatatgtcttgaataaatattgaataaatataaaagcaacatttaacctactaaatcatagtttagaaatttcctttattctgatctataacaatcattcaatgcagtcctactgcattaaactttttaaaatgtttacttctacagttgatatacagtgttataataaattctgacagcataaattaaatcaatagaaaaactattgtccaggctggtcttgaactcctaggctcaagtggtcctccagccttggccttcttggctgcagtgagccgagattgcaccactgcactctagcctgggcagcaaagccagaccctctctcaaaaaaataaaaataaaataaaataaaatgaataatcagaagcccttggtgaagattaaatgagggcacaggcatgagccaccgcacctgaccttttaacattttttaatggttaaaaaaatcaaaagaataataatatttcatgacacatgaaaactgatattcaaattttggtgtccattaataagttttattggaacacagatctgctcatttacttatggattacctctggctgcttttgccccaccatgacagagttgaatagttttcacagagacattgtggacagcaatgcttaaaaatatgtagtaactgggcttttacagaaaaagctcactaaccccattcaaactgattcccagtcatcctaaatgacaggaaaagatggattgagttcagacatggatgcacactttattgataaccaactttgttagacataattaaacactcaaaatttcagaaacatcaaacactgttccattaccagccaggaatggtcccatgagggttttaggatttataagcatcattaaatgttgcagtagagacttctcagccacttcaatgatttgccttgaaggtacttaatattttcaagtaaatgccagggttggagttttgagtgtaactggaagagtttgctaatttctttgtccctggattatcatatgcatgtgattactgcaaaaaaaaaaaaaagtttatactttccccaaagttgctcagctcagggtttgtggctgcctaatttatgaatggtggtggtatacatcatgtttgtccctttcaggtaaaagggaagcaaaggaagaaagaagaaaagaagacaacccatgtaggatgttaaccaggtcactggttttattgtcacatgcttttaaaagaacatgcatgagtgagctgtctcactttccaatccaagaatgtttgattccactgtgatgaaaaattctgtgacctggcaggaaaacactacaagaagggcagaagcggaaaattctttctattttccaatatggctttctttgattcaagaaaggcctcctctcctccacatctctgtcctgctcatgaccccagaagatctcaggttgactgcatttgttctatgccttcctcaagcttcacctcttctgtgagcctcctgggtgggctccttctggctaaatcttcctcctcactgttgcctttttatcttatgcaagcacctgccttatctaaaggtacataccttttcatagaacacttgcctgtttacctagctatttccccatgactatgggctttttgagaggtgctgtgttatttatttatttatttatttatcattttgttttgagacggaatcttgctcttgttgctcaggttggagtgcaatggcgcgatcttggctcactgcaacctccgcctcccgggttcaagcgattctcctgcctcagcctcctgagtagctgggattacaggcacccaccaccatgcccagctactttttttgtatttttagtagagaaagggtttcactatgttggccaggctggtctcgaactcctgacctcaggtgatccacccaccttggcctcccaaagtgttgggatcacaggcgtgagccaccttgcctggccactgtgttatttttttttacttctataccttcagcaccccaaacagtgcccaatacaaagttccacactaaatatttattgatggaataatgaatagggttgggggcactggcagggagggtgcccactgggctgaaattctggggcctgaatgcatcactcccttcgcctctggatgagaaaaaagagggacagtacccatgaggcccctagggaagccttctgcagaccaaaagacctctttgaacagagggcagaggaaacaggtctagagaaagtgaatgtgaagattcaggctttagaatgagccttgcagacctgctggcagtgacaagaattacctgtgtacagcaccttgtggttcccatgaccccatttagatctcatcatgaccctgttgggtggatgttattttctgctttacaggggagagaggccaaactcgtgatctgatctgtctgatatcacttacttaaacagttaagtggtgactcaagcttggtcttttttttacaacccggtgagctttccttcaggaggaaatctacctctctttgtgatggtgacttcacagaaaaattctaaccccttttattcctgctttctggtaatcttcaagcatctaggtaattatcacgttcttatgcattaactgttctccctcaaaacgaacgaaaaccctaaaccgaggcattggtgccctctgtcctagggcttttaattgctgtcttcctagtgttttagtgctaaaagcctgcccttcagggtggtggaaggaacctgatgggggacagggttttgaccttagagcatgcaggatttaaagcaggagggccaaattcagtcatcagatgcaggcaccaggtgcacgactgagatgggggctgtgggaaatgtatgtgaagctgctgaaaattaggacagaatggacaccaagagccaggtcacagcccagccgaagagtctgtgacaatggctgcaagagggactgtgggtcagggtggacacctgggtttttgggagggaaggttcaagttcacttctacaccagtgcaggagccatgcctgtttttttttgttttttgttttttgttttttttgccactgagtttggaatgaggcctggcatcttctgggatggagaggatgcggaattcactgtgaccagggtttaaagcaccaccaggggaactatgacagccttcacgtggaatcatttcatggcttggatgggtttgtatgagagattatcaaacccgggcctttgtaaggcatggacacaggggaagggtccaagaccagtgctccctttgtgtggctcatggcattgggcactgtgctgggcactccgtgggtgataaattcaatgaatggcacccgcagccatcccattaggcagcctcaaaaccaagagtcaatcttgatgcctgcctcctcctttcaccctccagtcactgaatctgtcagtgatactgctgtgatagctctgaactctgcccattattcttcaacttgtagctaccaccctagtccaagccagcatcacttttctcctggagttctgtaacattctcccatctgttctcctcacatgccctggagcctgcactgtctccactgccaacctgcagccagggatcttttattattgattgattgattttagattcagggaggtacctatgcttgtttattacacgtgcaaattgcatactggtggggattgggcttctagtgtacctattgcccaaatagtgaacactgtaccctgtaggaaaattacccccctgactctccccactataaaaatgcaaatctgatcatatctggaactccccttctaccccattccttttttttttttttgagatggggtctcactctatctcccaggctggagtgaagtggtgtgatcatagcttactgcagctttgacctactgggctcaatccatccttctgcctcagtctcccgagtagctgggattacaggcatgcaccaccatgcctagctctattgtgcctcaggccacacctcaaattttcttctcttttctttctttctttttttttttttttttttgacagagtctcactgtgtcacccagtctggagtgcagtggcgtgatcttggctcactgcaacatctgcctccggggttcaagagattctcctgtttcagcctccctagtagctgggattacaagtgcccaccaccacaccggctaatttttgtatttttagtaaagatggaggtttcaccatgttggccaggctggtcttgaactcctggcctcagttgatctgctcaccttggccactcaaagtgctgggattacaggcatgagccactgcaccctcaaccaggtcaggtctttctgttgtttgctctcaaagtatcatgtactgttccttccaggcccttatcatgttttttagggatactgttttttttttttttttttgcacgtgacatattaattcatttcccctccactagacactaaattctatgagaaggacagtgcttacttttgctcatccatgaccgtgtttcccaagcaaccgatacttggtaggcgttgaatgaataaataaataagtacatttcagtgaatgaaggaaggaatgcataaatggatgcatgatgagagtaacgatgcatggcagcctgctgtgcagggatcagagggaacacaggacgagacagggcactaggctgcgacctcttgcttcctggaagagcatggagactcatttttgaaacatttccttaaaacatgttttattggccaggcacattggctcacacctgtaatcccagtactttgggaggccgaggcgggtggatgacttgaggtcaggagttcgagatcagcatggccaacagggcgaaaccccatctctactaaaaatacaaaaattagctgggtgtggtggtgcatgcctgtaaccccagctactcgggaggttgaaccccagctactcgggaggttgaggcaggagaatcgcttgaacctgggagacggaggttgcagtaagcccagatcgcgccactgcactccggcctgggcaacagggtgagactctgtctcaaaacaaacaaacaaacaaacaagcaaacccatgttttattattctaagaggcttccctaaatggatgtagctatagcaaactaaaactggaattacataatgtaatctgaccccctaaaaagcaaatttgttcttatctaggcaaaaataaacaaactagaggttataatgtaacatgagtgaatcttttagaacgaagaggaagggagagtggaataggaaaggtgaatacataggatgggcctgtagagtctcatgtgacttcttttggctacttggtgcttgaatgattttagctctgggccaaaggcatttgcctcagcgtgctgctctctccggaaaccaactctcctccacttgtgcacctgcagggtgaggtgcgtcaggactgttgggttgaccccactttacagatgggaccactgtaattgcatgaacacagtaactgggccagaggcaacaaatatgctttctccttcgcccaagcccctccttcatccagtgcacacacactgctccataagtgaaaatgattcctactgtcaccagaatccacccttactcaccgtagcaggctgagacaaacactgatcccccaaacccactctatgctggtgcccaaacagccagtctagctcccagtctgtctcttttacctccctgggtcagtgctcctgaagtgggttggggaggggtggggcagtggaggtggaggcctggggaagagggcagagttgtgtcaatgagtactgatggtgtgatggaaagctcccaggctttggagtcaggtatttctaggttcagatcatggctgatcttgtagcaatttattaaatctttctgagcctttgcattctcatctgtgaaatgagcatggtaggatctaccttgcaggatcactgtaaggactgaatgtggaaggcagccagcacagacactatgcatgcagttgggaccccttagggtttgctcatttttctctttatgtctttccctttggaagtaacatggtgcagaagatggatgtgcattttgcagccaggctgacctgggtgagatcctggcttgaccatggactagctgtgtggtgttatacaagtggcttaacctctcagagcctttctttcttcatctataaactggggatagcagatgggggagggtctgccttgcaagttgagcattacacaagaaaatgtgtgcttagtgcctggtgcagagtctgggagtgaattcattacatgtaaatttcctttttgtgttcttttgtggatcgatggagtgattcatagttatttgcccatctaggggtgattgaatcttacaaaacacacacacaaacacaaacaaacacacacgcggaaggagatgtgagcccaggagtagccctgcagaatattaaccaagacatctgctttcacagcctgtctacacaaagggctgttgtggatcctgctcgcgctggtatgccggtggtgcaccagaaccacagcttcgtacaaggcagaggctctgtctctgatggactctgctctgtctggcccatgcagcttccaagacatcctggatgataaaactccccctctgttattccgggaagtgtagttccttccatttcacttataaaaatggccattaaaagaaaaccaaaacctcacatcctaagctaacccctgaggctgtttttctacatttgtccacagatggggcagaaacattccttctagagttgttcttagcactaaggttttttggaaacctagcaagagctgagtgttcgtgaagaaatgggtgctttgctctgacattgctagttctctgaaagctcccaatgcatgtatgtttcatcagctttgtgtgaaatgtggagagtgggaaaagggtttctacgaaacttctgcctgcctcaaactgtatttaaatgaattttgggctttggagtgagacccacctgggtttacttaccatttacttaccttgagcagatgccttaatctttttgaacctcggttttctcacttataaaatgggagaggcaggagagtcaccagttcagaagcttgttaggattcaatgctatagtgtttgttcagcatctagcatggaaaaatataactacttggcagtgttcctctctccttctcatcattttttcagaggtcagttcaaaggatgagctaattaggggtgataatgccaagctccctcaaacagggcatgagtgtaggtgtccacctggccgaagaggacagcaggcctctaggttgcttgtaggcagcactttcagggcctcgggacctgattgtccaggcaaagcaaggcataaaggaaagttggggttgcacatgctgtagacacaggtcctggtggctctctcccctgcttactggactgcaccttcccacctgtcctttctcaccacagtcattttgcagttgtggccccagcagatgagtcttcctttcccagtgttcaggtgatatcacctgggcaccgagggcttccaggtgtgaggctggtgactttttgattggctgtggtttaagcagtggccgctgatcagtcaaatgatgcttgcttcaggcgatttcttctccactccccaactcctccccaccctactcacgacatcattttgtctccccttcccttttcagggtagattggtgggagaagcatgggtctttgagtcagaccacaaattcgggctcaccattgtcatatgtgacgtctgacattattgaacctctccaagtcttagtttttttatctgtaaaataaggagattatgcctgtctcaacatttctaaaatcacttctatggaattctggtttggtgggatgccacaggtgtcacataaacaaagatatatgtgatttgaaaagtatgagcaatgctgggtcaggtgaagataaagacacttcttcactacaggacttcttgcaatgtgaatcttcaagaaggccgtataatattcaacatttccaaacttatgttactaccatttttttttaaacaaacagaatatccccttagacatgaaaggtgatataatgtagtggtgaagcacacaggcttgggagccagatggcttgagcacaagccccacctttgttccttactagttgtatcagctgtttactaccgtatgacaattgaccacaagcatagtagctgaaaacaatgcactttcgttatattacagtttccatgggtctggaatccagtagagctgagctgagtcattgcttcagtgtctctcatgaggcttcagtcaaggtgcaggccaggattgggctctcatctgaagtctctgctggggaaggatctgcttccaaacccatgggactgttggcaggactcagttccctatgggctattggctggagatgtgggcctttccagcataacattctgcttcattaaagccagtgaagaagagagtgtgctagcaagatggaaggcacaatctcctgtagtctaatcatggaagtaacagcctgtctcctttgctatattctgttggttagaagcagtcactaggccagcctacactcaaggagagagactatgtggtggtgtggatacccgaaggtggggtcttcagagaccatctgagagcctgcctgtcccactagttgtgtgactttgggcaattactgaattcttctcatttgtaacattggtatgataataatatctttataaagttgttgtgattaaatgagcatatataaaacagtgtttggcaaataataggccctatataaatatttgcttttatagttacctagaccggtgtctggcacatagagaaagcacagtaaacattggttgaatcaatgcaattgtagttccattgcagttacatggaacatgctttgggaaggctgccctacttaagaatgctgcaaggattagatgtgatcagctatgtgaagcatctagcacagtcccaggcacatgctaggtccccagtcaatgttagtttcccctcctacttccaggtttggatgtagagctgagattcaaagcttaagagaggtcaggttccagcttctccttctgttcacctcctccttctttccctccttctctctttccttctcttcctccttccctcctacaccaatagtaattttctcggtacagtgcctggttggtgccatcagcagttaaatgcttcatagtggctctggatgaggctggcaatgacaattaagtgtacttcaggggcctgggtggagatggaaatgaggtgaatgggggaaaagagaataaacggctaagaaagtggaaaaaaagacacagaaaggaccactttgaagagcaatgttattttttctctatgtacctaagagttctgagatgctttaataatcactgttagaatcttaaaaacacttttccacgtttttcttccttcttagcttcccttaatcactatattcaaagcagatatttcttcccagtgttctcctctgcaaattgttgcctcatgtctacttttaagtgaatcaaaactgacccgatgagttaataaaaacaactgacatcagcctggtgctctgcatttgcaactcgctttcacatacattgcatttgaaacttgcaacaacccagggaggtgggtattggaatattgctgttttcttcattttatggtggacagaaagcttggggatgctgaagtgaagtgatcttgaacagatgtcagcatcaggacctgtacctcagcatctaacaccaagccaaggcattcttcccactctatcattcataggcagttcatattaatggcagcttattaataaattgtgagaaacaaacccaggccattatatagcaacattatttgttggctgtcagttggggaacaatgaacatctttagttttgagaaacagttatcaaactcttcctacttagcctccctgagtcttacaagacactctcatattttaacttgtcttctttcaaccagcaaaggaatgattggaagcaaggctaggtaaggggagtggctgcctagaatgacttggcttatcaggaaggctctttggtgtcttttggctctatcccttatgctggctgtcctctatggagcaggctgggcacttggctgtgatgccagtgactgggcactcagacccctcttgttccatcagtgcccagaaaggggccaacagcaacaacttctggatgcattcttctttgctctcttggagaggccagtcttgagcacagttttctcttggcgatgggctggatccaaagacttggttggctccttctcccatgtccatattgcttttgtcctgtggttcccaattaggcatgattttgctcgtacttcctacctcctggggacatttggcaatgtctggagacagtttggatggtcacaactgggtggggaggagggagttattggtatttggggtggaggccagggctgcagctaaacttcccaaaatgcacaggactgccccccacaacaaagaattacccaagcaaaatgtcagcagtgctgaggttgagaaatcctacttagccctattcttttaggaggtccagtaggtctggaggttgaggcagaagaagaaggaaactgggtgtttgtctttttacatctcagagtactctgtagggatgggctcaggctgctaaggaggtacttgtcttcagggcaccccatcactgccccccacaacccctacttatctagccctcctttatctgtgttaattctgttttaaaccagtactgtttgacaggcagaagcatcttcccccgagttcctatgcccggcctgcttttggccgtggccttgatggctccggttgggaatccatgtgttactgtttggagagagtcatattttttacagcaacataacccattttacctttatggtaattgttttggaataagaagtaatcatccaggactgaccaacttgcttttctaagtgctcctttctcactcctggcaaattgctttgagaattgaacaaagcccggctcaatcatgcaggatatccattccaaaggatgccggtgaagtaaatctctgttaagccagctcaagccatgcctcctcctcccttttcccagagatcaaatagtgagcgtgtgcttcattccacatgccccttgtcttggggatgggtgctttaagcctggggcttgaccagggcacttgcgatgctcacgggactgcataggaaacttggtgcaatagactgtggtattaaagagcttttggtccttggggctgaggtcggagttagcactttccacgtggctgttgaagttaatttatggaaggctttccttgacgtatatcctatggaatgttaaataggtattgattgaagaagtagtcaaatgggttggagaaactcatgttctttgctgcaggacttctcaaggtctttaaatggttaatgagctgtatgacttgtcaagaggaggatatagctatgtggttatttcccaaatttatttggtcttagaactctgtttttaatggagcatctcccaaggtgagtgatctgctgaaaaggatgttatcatattggaaaggggaagaattcgatctcctccactctcccctcctccccttccctgccccttccttcctttcccgtgatatgatacaagatttttgttctgggggatgtcctcttttcattcataaaatgaggttttgtgaggcagcgtggtctgatggaaaaatcataagcgctcccacctcaaggatgttgaaagtgctcctccctctccctgtaggagcttccatctcatccccttccccaagctaactcctgcttattcattttcctgggctcagcttaaacatcacattcttgaaaaagcttttccttggccttggctcagggaatatctgggaccgcagcccagttcagctgcttactagctgcctgaactcactggttcagttgtcaacataagattgcaagagaactcatgcatatatttttgtgtattcctggtgcttgtatttgaagtccaagaagaggattttgattatttgttacttgtgggatgatggcaaggttaggagtgttgaaaaaaccagtttgtaagaagagctcttgcctgggtgtggtggctcaagcctgtaatcccagcactttgggaggccaaggtgggagtattgcttgagcccaggagtttgagaccagcctgggcaacatagctagacctcatctctactaaaaataaaaaaattagccaggcatattggtgcacacctgtagtcccagctacttgggaggctgaggtgggaggattgcttgagcccagggatttgaggctacggtgagccaagattgcaccactgcactccagcctgggtgatagagtgagatgctgcctcaaaaaaaaaaaaaaaaaaaaaaaaaaagagttcttggcctgagtgtagatggggtcttcactgagtccggtgctgtatgtagctctgcctgtacggcagcctctgctgcgctctgtggtggaggaaaggagcaccaaaatgcgagttgggagcccagggttccaggctaaatttcgattctactcccaaggcctgaggtatgcagttatacaagtgattgtgctgtaacatgctgatctctagaagtaatttatttctatttgtgtcatctccccacaaatgctattgtgagaactgctgccatcttggttgttaatatgtgactgggagtcaaaatgaacaggtacaacaccagtgaccatccctgcagcaccagaaggcttatgaatcatgtctcagagcagctctgtgggctcgttgtctcaggagatgccaaaccacagcccttctattcattctctcattagttcaacagacactgattgagcctgaccctgagccagcctccatcagtgcagggtgtgggggatatagaatgaataagacagtgtccttaactcaaagggatcatcctcagtttctccaaaccagaggtgccaaccttcccactgctgtgtctctagtctgcagtcaggtacaatccaacttcttgaatccattcactttgcatagtggcagccattcctctcattcatcagtgttgcctcttgcttcaggggtccagccttttagtttacaggtcaagaattttagggggatctttctcctcctctctgccgacccccaccttggcccatgggggtgagaacttctgcttttacatctccccgctcagggaaggactgccgtgtaagctctgttcctctctctgccctcctgtttctcttcattagaggactggttgagtcatgttttgctgctgggcagggtttctggtgcctcagcagtgggaaagaggctccactttatctttctgagctgtttgccccaggactcaaagacctttgttctcactccaagcctggccaggtggggcatcctcatggtctggtgggttccaaggtctagacctggggcaggagtcagaggcgtccactttggcctgagtctaatctgtgtttgccattccagctttgtcagagggctctactttgggtggtttgggggtataaaactggccattaataaatctgaaactctaattccccttgttgtctttgttagctggtcagcgagaggggaagaagggttggtgcccgcgttctggctccagccctatcccagacctctaaacttcaaagcagagatggtgagggacatgctcaaggtcctgaggactcttggaagatgtgggacttgaattcatgtctcctgactcttggcgcagtgctcttctcccgtatctgtctctcctcaaatggacagaactcaccagttggctctctgcttgttgaaaagagggtatggctgtgtagatgccatgataaaaatatggaatctggacccagagaaaattgggtttcaacattttacattttcccctacatcttaattccctcatctggaaacagggttaataagggtattttcctcagtgttatgacaagcatgaaagaatccacataccatgcacaacacggtgtctgaaaccgagcaattgctccataaatgttaactattttcatgtcatatcaaatgaaacttccagctagaaaaatttttcccaagaagaggaaaacagtatccagccaatgtaaagtagcagggcgttttcttaatgaacagtgtatcagctaagtttttgaggagcagtaattcctgtctggaatttacctgggtattgtaactcttccctactggccatgtagcccaggctgaatgctctcagtatatacatctagaacaccacaggcgccaatatctataaatagggaggaagccataaatgagagctcattaagttcttactgactgctgaaaagtaaattagaaaaaataaacagagctgaacatttgtgtaaacctcaatctttttgatgtttttcaattagcagagccatttttcatgtgaaaaattaatggctgtcatgtgccacctggcttatagaatcaagtgacaatttgttttaatgaccattttctacctctggattcaggtggacatgaccagttacaggccattggcgatgggaggaggcaaaggggagtgggcctttagggagcactgcccccatgccaggcacagtgccaggcttgcaatgcacgtccttccctgaatttcctccatggcccaatgaggctgttgttatcctcattttatacatgtggttctgagaggtgaagaaattgcccaaggtcacacatagatgttcagggcagtctgattctataatttgtgtctattccaccaaatcacattctgcagagggagaaagatttggcaggaaggagggaggtgcctgctgatctctggcaggcagcctgcaacaagggtgggactgaaccaagtggtgggggttgacatgggcagagtccagcaacagggatcctggtgtgggagatgcttagggttctgtcagcgcagaggtctctctttgaatagcaaagcatttgtcatcagactagggctcagagtagaagtccagtctctgggagggagactgagagtaaggcaggagccaggcaggatgtctgtttcagaagggacccgagttagcagttgctcagtaagaccactgcatagttgatgaggccaagaaactagaggcagacaccacgtcaaaggccacctgtaatgctggagccacctcattagagttggcacagtagcaaggaagactgaggcagagctgacacattctgtctggagctgccttttggagggaagtgaggggaagaaactgcatgtggagtcagaagcctcagctgtgggcagggctggagcagcggagcaggcctgagagccaggcaggggctgatgaccgtgatgacagctttcacggattgtgggatgggcccttttatgcataatctttaatcctgaaataacttcaggggataggcactactatctctttttgtatatggggaagtggaagttcagagagacagaggggtgaggtcctttgcttacaggcacacagtggccatctggcaaagcagaaatgaaaacccaaagatctgtgcatgttcctcccgctcccatactgcctccctgccatccctaattcaaaacagatgattactttctccatccactgcttcttccctgccctgcctgtaactgaccagcgccagtctgcagaaacagcagcagccttggatttaattttctgggcattataaccgacactgcggagaacatctcggctctagggacaaatctgtctgatgacagtgcacacgtgagctccttcctagactgagggtggagccgctggacctgacagttgcagcttattctcccttttggtaataatgcacgactaggcaagagaggaaaaaacctgccgagtaattctttaattttaaagagtatttctccaaggcgcaggaatcaatcagcccttgggatccgagcttctgttccaggggagggcgacttaggaacagctctgcctccctcaggcagggtagggactcagtgacctcagaaagatttctcgcagccgcaggctcctcttaggagttttgctgattggtttggactttactttgaacgtggcagtagatagaagtgttaagatttttcataagtctgtctttccattttctttcctcttctaattcctgaggttcataattattctgttcacccttttgtagttggataactgatttttgttgttgctgttgttgttgttgctatttctttgggcagtttgaatattcttcaatgtacattcctagaagccttccagaagccacgttcttcttctgggcaattctagggagatggtgtttgttccagccctggccttgctgattgactgtttaaaatttactctccctgtctctgttcctctctctttacagcattatttatctaccagttcatctacccaccaatagtcaatttatctatgtaactatccatttgttcctccatgcatgtcatggtcctgaattagcaaagattatgatgctcggctaagggacagcccttatagactactcacactttcctatagccatagaaagcaaagagagttaaataaaaaatgaaaaatgcaattaatctcaaaccttgttggaatttatcatttttctaaatgccctaaaaggttctcttcttttctgtgttgcagacagaacagaaagaaaatcagacttatgtcgatgggggttttagaccttatatccacaggtcagatttgtaaggttgaagaaaggaggtgggcacccaagggtgaggacagctgctcactgatctctcctgattgcccacagggtaggtcttgcactctagatcccaggtgagggtttgggaatcattgcttgtccttgatcactttgttctacagcatcaccccgagacatccattcacaactctgagataagtaaccttggaatggggaagttctggtacctcttccagatgcctatctgctttccttttattttttcagaattaatccactttaatttttaaacttttttttttttttttttttaggtagagtctcactctgtctcccaggttggagtgcagtggcgtgatctcggctcactgcaacctctgcctcccaggttcaagccattctcctgcctcagcctcccgagtagcttagactacaggtgcgcaccaccgtgcccagctaatttttgtatttttagtagagacagggtttcactatgttggccaggctggtcttgaactcctgaccttcagtgatcctcccaccttagcctcccaaagagctgggattacaggcgtgagccaccatgcctggctaatttgtaaacttttaattgatgaataataatcatatatatttatggggtacaatgtgatgtttccatacatgtaggcattgtagaattgatcaaatcaggctaatgaacatatccatcacctcaatacttatctttttttttgtgatgaggacttctaaaatctactctatgagttcagcttttgaagattccatacatgactgggcgtggtgggtcatgcctgtaatcccagcactttgggaggccgaggcgggtggatcacttgaggtcaggagttcgagaccagcctgaccaatatggtgaaaccccatctctactaaaaatacaaaaattagctgggtgtggtggcaggtgcctgtagtctcagctacctgggaggctgagacagaagaactgcttgaacccgggagttggaggttgcaatgagccgagatcacgccactgcactccagcctgggtgacagagtgagactccatctcaaagaaaaaaaaaaaagattccatatatatgtgagatcatgtgtagtatttgtctttctgagcctggcttatatcactgagcatagtgtcctctagattcatccatgttgttgcaagtgacagaattttcttctttttcaaggctgaatatattctgttgtatatatagacaccacatttaaaaaatcaatttattcattgacaggcacttaggttgtttccagatcttggctattgtgaatgatgtggcaatgaacatgggatgcagacatctccttgacatactgatctcaattcctttgaatagaaacccggaagtgggattggtggatcatatggtagttctgttttcaattttgtgaggaactgccatattgttttccacaatggctgtgctcatttccattcccaccaatgatgtataggaattcccctctcttcaaatctttggcagcatttgttatcttttgataatagccattctaactggggtgaagtgatatcttattgtggccttgatttgcatgtccctaatgactggcgatgttgggcattttttcatctatctgttggccatttatacagcctctcaagaaatggctattcaggtcttttgccaattttaaaatagagtgggccaggtgtggtggctcatgcctgttatccctgcactttgggaggccgaggtggctggattgcttgagcccaggagtttgagaccagcctgggcaaactgatgaagtcctatctttatcaaaaacaaaaacaaaaaattagctgagtatggtggcatgcacctgtccctgcttaagattaagtagtcccagctactcaggaggctgaggtgggaggatcgcttgagcccgggaggtggatgttgcagtgagccaagatcatgccactgcactccatcctgggcaacagagtgagagcttgtctcaaaaatgaaacaaacaaaaaaagaattattcgttttcctgttactgagtagtttgagtttcttatgtattttgggtattagcgccttatctgatgcatgatttgcaaatattttctcccaatctgtaggttgtctcttcacctgttgtttcctttgctgtgcagaagcgttttagtttgatgcaatcccgttagtctatttttgcttttgttgccagtgtttgtgaggtgaatgatatccacggaatactttcccagaccaatggggtagagcttttcctgttttcttctagtagttttacagttccttattcacctttcttcacggccattcacaaaaaagccaggacaagctgctggtgctccaaggctatagtttctctgcttctctttgttctcctaggatattctgagttgaataacatagtgttacttcatccttctatttccatcaacatgtgagactagcttttatacaatggctattttaaaaacttcttagatatttgaactctatttcaagcagttctgctgaatttagagtcccatattgacaattttttgatagtataatatcaaaaaatgaagctttatcttgccattttctgcagcaaaaagaaaaagtatatatcttttgtaaatatactgtctaaagttgtaaactgtcctttcttgaaagggatcattttaagagtgaggatcctgacgtcagatcccttgggttcaaatcctggctccaccactgattttctgtgttaccttaggcaaattactgaacctttccatgcctcattttccttatcggtaagacatagaaatgacactagtaattactacagattggctagcaatgctgtggattggcttgctcaatctccattccactctccttttaggctgccttcctgtactatggagcctggaaagcaacaatctccattttccagatgctttgcagctagggcttagaatagaatgtagggtctaattgtaattagaacacttgccccgtatttggaaggccaagtgaggccacgcacaggccttcttcctaacccttctgctggcaagcaagggagtgagagtaaaaggttttattgcagtgttctagtagtggttacagagacagtatttgggggcagagaattcctcattctggtttctgacctctggctcatagcactggggccatgtcatggacatagtagtctagtgtcagccttagagatagcatctccccaaattgaccagtgcttattgttctggaaatcagtcctggcacctaggccagagcctactcctccagctcttccagtgattttgtagtgcctaatttcttttattaaatctctttcggcttaaaatacccagagttgtcccagtttctttctttctctctctctctcttttttttttaggtggagtcttgctctgtcacccaggctggagtgaaataatgcaatctcaactcactgcaacctccacctcccaggttcaagtgattctcccgcttcagcctcctcagtagctgggattacaggtgcatgccaccatgcctgactaatttttgtagttttagtagtgatggggtttcactatgttggccaggctggtctctaactcctgaccttgtgatccccccaccttgacctcccaaagtgctgagattacaggcatgagccaccgccccttgtttcttgtactaaaccccaattgatacaagtacctcccaaggttgtcatgagtattcaaggaggtcatgaaagtactatgcagcagtacctgacacatggctagcacgatcactgtttaacaagcatctgtttttgtcaccatccattgctattctcattattccattccaaatgtgtccttcctttctgggcctggcttttggtgtgaaatgaggtggtttgaccagaatgctcctaaggccccctctggctgagtgattctaggattttaaggatgtcttattctgttcaagctgctataacaaaatactgttaccagtggaagctatcccagttaccggcagtgaatccatacgggtctagagcaacctcaattcttgcctcctcagaagaaagaatttgactgaggggcataaggcagaaaaagagatggaggtgagtttcagagcaggagtggaagtttatttaaattggctttagaacaagaaagaaagaaaagtatgcttggaagaaacccaagtgggcacctgaaggtcaagtgcggagtttaactgtgatcctagggctttataggctgaccctttcccatgattcttcccttaggatgggctgcccatgtgtgcagtgcccttcttatgcctgggaagtgagaacatgcagtgtgcttaggaagctgtatgcatgcccatctgaggctcttcttcccttttccagtggagtgcccccggaaagtcatactccaccattttgtctcttaatgcagatgcctaggaagtggcttcttcccaggcatctgcattcaattaacactttattttttattttttgagacggagttttgctctttttgcccaggctggagtgcaatgacatgatcttggctcacagcaacctccgcctcccgggttcaaatcattctcctgcctcagcctcccgagtagctgagattacaggcatgcaccaccatgcccagctaattttgtatttttagtagagacagggtttctccatgtcagtcaggctggtctcaaactcccgacctcaggtgatccacccacttcggcctcctaaagtactgggattacaggcgtgagccacctgccctgctgcaattaacactttagtgcaacaggtgtggcccttgaggaaatggcctctccctggcgccagctgccaatttatcacttttattttattttatatttttttgagacagggtctccctttgtcacccaggctggagtgcagtggtgcgatctcggctcaccgcaacctcagcttcccaggttcaagggattctcctgccttagcctcctgagtagccatgattacaggcatgcgctaccatagccccagctaaattttgtatttttagtagagatggagttttaccattttggtcaggatggtctcaaactccctacctcaggtgaaccacctaccttggcctcccaaagtgctgggattatagacgtgagccacggtgcccagccttaatttatcacttttagagaggcaatgtcataactgccgaaccatcacccagcattcttagtgggtgtctaagtaccgctcatgcctgtccagctccctgtaacattaccatagacgggtggcttaaacagcagacatttatttctcaccgctctggaggctggaattccaagatcaaggtgccaacatggttgagttctggtgaggaccctcctcctggcttttggatggcctccatctcacagtagcctccttctcactgtatcctcacgtggcagagagagggctctggtctcctcttgttaggacatgaatcccatcgtaggggctccacccgcatgaccttatctaaacctaattacctcccaaaggccccacctcctaataccatcacattaggtgttagggatttaacgtatgaattttggtggggacaccaacattcggtccatgacaaagggtcaggatacaatgtaaggtgaggggagcccagcaggttctctgtctgtgcagcaaagacaccagggcaaagtctacaagtgtgtttaggggagcactgtccagagtggctgcctggcagggtttctgggtctgattttttatgacaaaacgaaacttttctctttgtattgacttcaatggaaggatccctgctgccacactctcgggtttctttcacatgctcatagctctatggcttgagagaacctctcacaatcaaccagcttggactcaataaccctgtacagacaaacgaatgaggcatcctcccaggaattctagagttggaaagagcaccaggctgggagtcagaagtctcaggtcctagctctgttttacctgtgtaaccttggacaacccttcctgtctttgggcctcagttccctatctgtaaaatgattcagggtgagctcatcgccctctcagcaggggggatgggagatgctttctaaggccccttttgcaggaatgtcttataattcttcattcattctaagagccattctttgcttttcatattcaaataggcttgtccttgcatctcttttctcttttaccccatccagttggcatcactcaaagttccttttaagattttatgacttttctgaaataattttccaagtctgagtagttatttgatccatcctttgaattttttctttggggtgtgggtagaggaagcagtgggtcacttagggagaagccttccttctgggctgctgacagctgctggggccacgcgggggggtcactgcttctgtggacttggcacaggcagagttaggttttgatcccactgctctgctctgagagctgctgtctggctgcttatggtgcaaggactgagtatcttcgtgtgtcaccctgcaaagaattttccctgccgctttactctggacccaaagctccttgaaggagtggtcagctgtagtgctgtcatgttgaatgccgacaaaggactggaaaatcagaaaatggggtacaggagatgggaaccatctttgttgataccttgtatttgtaggatctcccaaatattaactccctaatccatgaccctcactggtatttgcttcccagcattgccatagcaaagcaccacaaactgggtggcttcaaacaacagaaactgactgtcagttctggaggttagatgtctgaaatcaaggtgtcggcagggtcacactccctctgaaacctggagcagggagagtgcttccttgcttcttctttgcttctggtggtggtggcaattcttggtgttccttggcttgcacctatggcatttcagtccctgcctctgttgtcccaaaacattctccccttgtgtatatgtgtgttttttaatgagaccagttattttggatcaagggcccaccctattccaggatgaccttattttaactaattacatctgcaatgatcttatttcccaataaggtaacattttctggtactggggtttaggagtctatcatttctttttgggggacacaatacaagccataacatcactgtaagtgagatgtcgtcatcctgatttttgtaggtgataaaacagactcagagatgtttgtgactcctgaatttcacatagatagcaagtggcagagtcagaatttagggtgtaattcacctgattccaatacctctgtgctttcgcgataacagcttttccattcacagcttctggagcacctggggcagaagcacctggggtggggagtgtgtgttaaacacacctgagcctgggtatctgtattttaaatgagctgcccagatgcttctgaggcatgctaaaacttgggaacccttgcattacatcttgattcctgtctcaggctaagggaggtggggagtggaacagctgctgattgttcagatggaaagtggtggtgggtgggtagtaagagtctaaactggcatctctcaaactttactgtgcacatgaatcatctggggatcttgttaaaatgcagattccgagtctaggggactgaggagggagctgtgattctgcatttctaacaagttcccaggcgatgttgaggcggaggctgtgtggaccacacttagagtgcaggtgtcctcgataggacatgatgggtgacaaatcgaggatggatcctcaattctacctgcacatgaagaccacctggtggctttttgacacttgaatctccaagtcccatccctagagacgattggtatttttaaaaatctcctcgagtaattccactgtatggccaagattaggaacaactatttttaagcaaggtgagggatgtcgggatgcatatgcagacagggtgtcagcttttttgtagtcctgcacttcttcctttggaaagtctccgtcctgccccactgacttgttgctgcttatctggaggctgaattcagagccaaagaatgaggtctggttcacttggctggaggggatggggcaagggctgttcctgtgccccactgtcgtttatgccagagccctgagtgctgagttttcccaggggctctgaaaatcagagtgggttgttgttttctaactggggttcaggcctccaatttcctcctttaaagcgccgcctgcctcgcccaacaacttcctgactcaagtctgccagctcacttcctctacttatctactccagccttgggatggcttctctgatgagtcctgccgcacccattgtcaagttcatgactacgccaaaggtcatggtgaggtccagagggagcgggtggatgagcagaaagaacacttggggggtcgtaggcaggtgaattattttattcagcagcagctcttaccaacagctttctcacactgtccaccctgtctcagctgcttggtccggcggcccccgcacacagctgcatggcctgctctctcttgccttcagggtcagcaaattaaccctttctctctctgggcaccagcatgagctgtgccgcggctcccctctgtccatcttgcagatggacagctttggctctttctctctttctctgggtgccagtgcacctgtgcagtgtcaacagggcaattataccttttatagacaatagtggtgtagagccaagcgatggccttcccatctagtgatggctacatggctatgataacaagtggagttttacacctgtgctctgaactcgctgagacacacagggatgtaaacatcttacctcggcctatccttgaccaaagcacagccatgttccttacacccatgcagttcccattgggtagaaacagctccaatgtgcagtatgtggactgtgcttatttaaccctcctccccaacagcccctctccccacccccacatgttttactggatttggccccaaagtttctgattttaaccatcgtactgatacagagggctgggctcccagctaaaccccattcttaagcctggaactgccccttaagtgaaaacagctgaccccatttttccgtccaactgttgcctttttggcctgcctcacccatatcctgtgcccataaaaactttagctggcagaacaacacaggcggctgagcatcgaggatacaagtggctgaggagtgagcagagaagcaactgagcatcagagactatggataggtgtggctgacttcagacagtgtggcttcagagaggggcccggccggagatggctgaacttcagggaaagatcaccttcccatcccctttccagccttcctttccactgagagccacccactactcaataaagtcttccgcactcatcacctttcaaacagtccatgtgacctgattcttcttggacgctggacaagaacctgggtgctgagagggcagaggctgccaccctgacccctgagctggttggcacttggctgatcctgatggcagagctgaaagagcgctggttgtaacacgcttggacgctgctgtggggcccacacagagcctgctcccaccagagaggagtgaccagccagttccagttccagtgttcgttcgctcaggttcctgcattcgctcactcacactctccctcctgcgaggagtggccagtggtgggctgagtgaaacgagacactccagttcctgcccgcaaagggggtcaagtgaactatcccctctcagcattttaccaaaactgtttatgagaccctgtggtggtagtagtttagagcagcagtggttgtgggggacattttacacctgtgttttagttttcttacctgtaaaatggagctaatggtagcatctgtctcatagcactgtgagtgtgtgggatgaattgaatgggatgatttttgcaaagcattttcgggcagtgcctgcacgtgaaatgtgtcttcaaggcaccggccagccacaacctgggtgagatggagcttcagggccatctgctgcccagaactcaggacactgcttttctacatctgtccctagaaagggacaaaatagacaggttggtaaaggggcctttgggtcaactcattcctcaccaagatctatctttttctttccattcttcttccttctctgagtttaatttttttaaagccaaacttctggagtaaattaaattgtttaatgagataatatgatgtagtggttagaagcatggactctggaatccactgactggctgtgccatttagaaggtgtgccatcttgggcaaatacttaacctctctgtctcagcttccttatctataaaacagggatcacaatagtacctgtctcctagtggtgttgagatagtgcagatacagtgcatagggcagagcctggtgcttagaaagcactcagtttctatcacctattactgactgcaagcctggcagcatccctatattataggatttcacatctcctttaatcccacaactggaagaggtatcacctctgcttcacagttgaggaaatgggggctcagaggcttggaaaatgggttaagattatataactagtaagtagtggagctgagatttgaaccttagaattttaactaagaagcctgaggtctttctttctttcctttttttttttttttttttttcaaattatactttaaattctgggatacatgtgcagaatgtgcaggtttgttgcataggtatacatgtgccatggtgttttgctgcacccatcaacccgtcatctacattaggtatttctcctaatgctatccctcccctcgcccccaaccccctgacaagccccagtgtgtgatgttcccctccctgtgtccatgtgttcttattgttcaactcccacttatgagtgagaacatgcagtgtttggttttctgttcttgtgttagtttgctcagaatgatggtttccagcttcatccatgtccctgcaaaggaaatgaactcatccttttttatggctgcatagtattccatggtgtatatgtgccacattttctttatccagtctatcattgatggacatttgggttggttccaagtctttgctattgtgaatagtgctgcaataaacatatgtgtgcatgagtctttaaagtagaatgatttatgatcttttgggtatatacccagtaatgggattgctgggtcaaatggtatttctggttctagatccttgaggaattgccacactgtcttccacaatggttgaactaatttacactcccaccaacagtgtaaaagcattcctattactctatgtcctctccagcatctgttctttactgactttttaatgattgccattctaactggcgtgagatagtatcttgttgtggttttgatttgcatttctctaatgaccagtgatgatgagctttttttcatatgtttgttggccgcataaatgtcttcttttgagaagtgtctgttcatatccttcgcccacttttcgacggggttgttttttacttgtaaatttgtttaagttctttgtagattctggatattagccctttgtcagatggatagattgcaaaaattttctcccattctgcaggttgcctgttcactctgatgatagtttcttttgctgtgcagaagctctttagtttaattagatctcatgtgtcaatttttaaaagcctgaggtctttcttttccagggactcttaatctggggtcccttaacacctagtagattatttgtgagtttcattgagtttgggaatcctttgaaattgtttcaagaacaggcgtttatgtttttgggaagtcagggtcaagatcacagtccattgttttctttagatccacagagtaagccactgcattattccaactttcttataagatagaacaattatttaatgaactccaaatgtatgaaacttccattgttgagattatgtaaataattgggctgtaatgcagctggattcctagaattaataatttccatgttcatactctgtgcttaccactctagtgcccctaatgtcatttcagcccctgtgtttctgggcagtctcaatcagaaggatagcatgcttcagaaagcttgcaatcactctgcagaggtagactcagagtcctgggtttcactgctagcaatgcttctaactctcggagctttatcttctttgcgtgtaaaatgtgaggattgcccagctgcactctgagtctctctgatgtctttctgatgtgaaatcaaggtggagatcaggagttgccttccttaaacaagggcaggcatgttttgggtagacagaaaagtggaaacataaccagtcagtcattcatctgctgcatctggggatggacctaagctgagcaggagcctcccctatcagtcctcttctcctttctccatgctacggccactactgaggactgtagagtcagagttggaggaggccaaggaggcatctcttaatttaccctgtcatgctactgagcaaaccgaggcccagagatggggaatgccttacataaggtcacatggctagtgcctggattgggacttgagcccaagtttccagaatccaaatctgatgtctacttacaaagccagctagtacacgaagagatctagaggccttctcaggactactcaaatgtgacaaatatgtggtctggcagaatcctgggacacatttctgggaatgctgttctctctttcccagtgcctcgtcatggacatgcctttctgtgggacgttcttacctgtccaggcctccattcactgcaggaggggaggggaggacaaaaggagaatagcagccccagggtgtgtgcctctgtcctgggcaagagggagtgtccatgcccttgctacttggcattctcccaaaggctggctgtttctgtgagcacattcccagcctgccagcctctttttttccctacaggtgtatgggattcctaaggggaattggacatagccttttatgccccattcttatgtggcaggaactttccttccgtccctgtgactcttctcagggctcctttgactgctttgggaaactctgggtttactcttcaaatcctggatggggaagccagagggctggaaagcaggctggccctggtgatggccagctctgcatcacttggccatctcacccacagtttggagtggaaagaggtccagtcacctgactgtgggttctggggagtcagagccagggcaggtccgtgttctgctaggggctgggagaaggcctgcatcatacacagttagtgggcagtacatgaaggcagtgaggaggtgtggtatgcccgctgcctttcacaactgcagaaatggtcactgatttctttcatcctcctcagtggccttgaagcccctggacagagcaatgcatcggtgctggctctcagagatttgtgccagcagcaggatgggttttctctcctgattccgtttctccctggttggttattagcacacctttttcctcctgattgagaacagctcaagtgggaactgctacagctaggggcagcatctctggtggcatgctggtggcagggggaaaccagatggggaggaagagccagtcaggagacatgtggctaatcacctgtggacccaggaggattcagctactcagttcctagcctctccaattatggattccctatcctgttcttttcacagttcatacttttttctttaaagtaaaaagtaacatgcatcaccatctgtgaaaagaaggggaaaaataaaactgaaaaaagaaggtaacatgcgacattaaacatccttctcctaaaagtatatctcgctatctgcccgttcatccatccatcattaacagtggctgacatgtgaatgtttaccaagtgccaggcactgtgctctgaggtttgcagaggaagtccctatagccattctgtaagagatgccactgttgtccctgtttttaaggtgagaacataagatacatggaggttaaggaatttgcctaaggtcacaaattaggaagtggcaaagccaaccaggaaccccggcagccgggcaccagagcccaagctctgaaccgctactgggccatctgcttctctgcttgtcagtggcatggagagatggctgcagggacttgccccgtatactaatgctggtagttcagagtggctgcatttggggtgacttttgactttagtctttaaattcttcagtcatgtttcaattttttttttttttttttttgagacagagtctggctctgtcgcccaggctggagtgcagtggctcaatctcagctcactgcaacctccgcctcctgggttcaagcgattctcctgcctcagcctcctgagtagctgggactacatgtgcgcgccacaacgcctggctaattttttgtattttagtagagacggggtttcaccattttggccaggatggtctcgatctcctgaccttgtgatccgcccaccttggcctcccaaagtgctgggattacaggcatgagccactgcacccggcctaaatttgtaaatgatgggcatgtatcatttttataatagctaaataaaaaaaccagttgcagagaatccccaaagcatatgatttggggaatggtaaacagagagcaggacgctttttttttttggtggtgggtggtgggggcagacaaaggaactctgattttgaccatcatctcgtggtgctcttgggaggctcatcattggttgggtcctcccccattgccttgttgtctctctgccacaagatggcaatcacagcacaaggatggatgggcttgcagcctccaggaaggaacactaagcgtctgtcttccagctacagagaagtctccctaatgcatagttgggggaaggggcttttagagagggattgaaaagctgacatcccctgctgacccaaactccaggcagtccggcagtcatagtcagacgcttccatttgcagtaacccatagctcttcccagaacagagctacattgtgcattttgctttctgatgaaagagacatagagacaaaatgacacagaggtttccgggcatagaatgaggccagtgagcctggagaatgggttatttgtaatctgtggggttatttattctgtgatgtgtatagattctttttgttccttgagtagaaattggtgctggtcttctagatgcagaggctacaaaacaaatcccagggtaggcagccagtggctttctctggggtcttcccaggtggatatctgggtagggcagcttccactgaggctcagcttttgggatgattcctaggaggaagactatcaggagaaagactgggggcttggttcctgtggataggtgcatacacgaatggagaggaaactttgagtggggaccatggcatttctaccacctgagatgcccagctgggcatacctggattggactcaggcaggggaagtgaaggcaggactcctgtattagttaacactagtggctataacagataaaacttaaaatctcagtggcttaccacaatagaagttcatttcctgcttgtgtaatgttcaaaatggctgatccctgatcagctagtgggtaattcttcctcaaatggtgatagaagcacccaacctccttccaacttgggactcttccattttcaacacgtggcttctacagattcttacaagaagtagaaagaacatggaggagcacacacgggaggcattccagccaggcccagtggggatggaaacatcacttccgccttcattccattggccagaaatgagtcatgtggccatccctaactacaaaagaggctgggaaatgtagtctagcctgtgcccgggagaatgaggaagtaggttttgtgtataaccagccaatttctgtcccagactcattctttatatggatgatagagtttatcccaaataaataatcaggtttgcacacacagatattcatgcacaaagatgttcattgctctgttattataaaagtaaatgtttagaatcaatgtaaatgtttatctataacgtgttaaagaacttatagtctattcacacaaaagtgtcacacagaagtgttggaggcagaccccaaaatcatgtggtagaagaacatgttggcccttcagacatcacagtgctttgttaagtagcaatcccaggaagcctcggggttcacgtgaggcacaaataaattcaaataggcaatacctattttcatttaaatgttctacgacttagagtcatacacaaaatatttactttaaatataaccctttaaaatattctctctgtatttctaagaacatatttcctcgaaagcaaaatgtacaattgaattatattgcagactttgtaggagactatttaattcactttttatctccctggttcagtctctgactcccaccttgaaccacagcatcacagggcagagactgtgtcaggcttgtttactgctccgcacacagtgaggcgcctatagcagacatttggtaaatatttattgactaaagttgagttgaatgggatgatgtcaaatgaaaaaacagctggagtaaaaacaagggaaaaccatgaatgtatggtatgatgccagctatgtaaatagaagttcatatatgcatatgaaaagactgcaagagagcatttcagcacaataggattgcctcttgttctctctttcacttagggtttcctttattttccatttcttttacagtgaaccatttgcataatcatttacagctatcatttacatagtcaagattaaaatttaaaaatgttgctgtagggaccacaaatgtacttcggggaaggtgtcacagggtgagggatacaatacttcctggaggtgatggacaggtaggtgtaggagctacttacatcatgtatgcttagacccttggtctgggaactgggccagagcccaggctggatgcagggagctgggagcacttctttgtcgcatcttcatcctgaccccccttgactctccctttcaaatgtgagcctgtccttcatctgtgctgatggtagtgtaggtttcaccttgggggagaggtgtgggtaggctgtcatcacagcttgggtaggtggttttgtatcccttctggaaggctccccaccctcctaggtttgccagtaaaatacaggacaaaggttgaatttgaatttcagataaacaatgaacaatattttagtataaatatgtcctaaatattgcactctttgtataacatcaccaaactaaagagccttgttttggtgaaatgcctgctttgtaaacaatggagaaattgcacaagccttgtcggtgggtacccgatgcccagtaacgtcagcttcttgacttcctctgcacacttcccttccctcttctcagtctctaccttcttcccacaggactgccagcagcagcatctgaaccgaaggctgcattgcctgtctcagggtatgtgactttgggatgtttttcctggagaagcccacctggggtgaatcaggccctgaaaactcctatgggtagcttttgagggttcatcccttcctggacagctccttttttctggccaattgtgccccttattgggttgccatctcctaggcctctctttccccaggtcctcctcaataaggttgcaagtttcccagcttctcctggagtctcttttctctgaaagcagcatcctgccttattgaagttttctcaagacagcccacatttttaggggaatagacctggataaaaatgacaaacatttccattgtaatacatttctgagacatttaaaaacattcacgaaagccatcctgtggtgtgctggcattgaatggggagtaggggggaaagagggtttgggagggggtgtacggtaaggaaaagacaccttgcagtaggagaagccaggagtggaattgcaggctgagctcggagtcctggaagacttcacgcttgctgggaagcagaggaagtgctagagtccacgaaggggaaacagaagcagagaacaagatcatcttgccagcaaatgaggcacataggggttccgagcagaatatgcagggtctggctttgtttcagcagatgaagcctttgataggcggctgtgatccctcctgctggagctgccggggactgggcatgattgagagcacggcccactcttcctcgggcccttacttctcatactcatcaactgaaagccaaatcagtcctttgtgttgcttgttggttttgaaaagtaaactttcggaggagggttgtgaatacatcatccatgaatatggaattttccatttttcaaaacattagtttgaaccaaacaacatttccaaggcctagctgctttggtcttagaaaaacagcaattttaggtcaggcatggtggctcacacctgtaatcccagcactttgggtggccgaggtgggaggatcacttgaggtcaggagttcaagaccagcctggccaacatggcgaaaccgcatttctactaaaaatccaaaaattagccaagcatggttgtgagttcctgtaatcccagttactcaggaggctgaggcacgagaatcacttgaagcctaggggacagaagttgcagtgagcctagactgtgccactgtacttcagcctgggcgatagagtgagactccatctcaaaaaaaaaaaaaaaacaaaaaacaaccagaaacaaagcaaaacagcaattttatataccacaatcataaaactacacacacacacacacacagacacacacatgcacataaacacatatcatcgtgtaagataaactcttgctgccagagcttggtaaccgggctctgaatggccagccttgtcacagacaactgctgtggctgacattgtgacacaaggtctcctggagttttttctcataattttaaatggaattgaacagtttgcacaacctcctctgcttaatcagcaccttcttctggagacactgctttgcttctggtttctctggaagttccccctgccttggtgaactgagctcgctggcccaccccagggagccagggcagagtcctgttagggttaagttctttttgccataaatgtcaaattagttttggaaacatcagccatatcctgaattactttgtgtatccctattgtttacctgtgtattagctataactgacaggcacctaaaccttcaggttgtcaaaagacctcctggatttggtgttttccaaccattgtcctatgcctgtgaccctgtgacctcctgagatgtctgtgatgggtgaaaagcaaaacacccagctagtaagagactagatgtccccaggaatgtgggcaggatgtggaaactgcatcctggaaggtaaagcaggatcaggtcccttgccagttaagatagcaagagtcacagagtttcaatgagactgatgacagaatcaactggcaaagcccagaaaccagggtgggagagtgttcagtctatgagtaatcatgtggacagcagtctgttgagatgggtgatttcttctttaattgtcccatcctggttcctttattgagcctcagtttcctcatcagtacattgaagggagtaattcctacctcgtagggtggcggtgagtatctgaggaagcaaggtgagtggaagcatgttataaatggtgaagctgtatgtaaatgtcatgtgtgatgaatagtgagaacttccttcctgggggggcagttaagggaggagggaggtaggagactttgagaatctgaccatcagggagtaattctagtaacctagtgaagaagaatggactgcaattctgggtgggtggacaggaatggagcagggttgctaggaaaccagcctcagtcctgctggaatgaaggatgtaatgaaggatgctaaatgttcatgatcaattcaggctcttctgagcttccagagactgagggttacccctgcactgctactgccattgtgtggctttggccagctatttcctcagggatttggaaacacagaggccccaggaatggctcccttaccgactgttctccaagggctcagagatggtatgttgtggtgtcatgtttcccaagcagtagtggtcataaaacatttaattaattaataattaattttttgaaatagggtctcgttctgtcacccaggctggagtgcagtggcatgatcatagctcactgcagattcaaactcctaggctcaagggatcctcccaccttagcctcctgagtagttaggactacaggcatgcaccaccatgcctggctaatttttaaaattttttttgtagagatggggtctcactatgttgcccaggctggtcttgaactcctgacctcaagcgatccccctgccttagcctcctaaagtgttgggattacgggcatcagccactgtgcttggtctcataaagcattttggaaatcatagtgaagtgatgtatagcaacagcagtttgagtataaatgttcactaatcaatcaatgttgaaatcctatatatatatgtaaattataggaaaaagcacttcatataacctgtgctctaatagatgtgcctgttgtgagcttccacgatatcaagtaagtcccctgtcctccttgcaatgaaaaaaaatcttaaatacaagtgattaaacacaactcaaactagcttaacacaaaagcaagataatttcttggcttcatcactggaaatgtgaaatatcactggacagctaattgtagggctctgggtccctctctctttctctctacttcttggaccagttgtctccacatgatgggcaagacggccccagcatctcatgcttagcaacatcagtggaaagaagagtctttctgaataccaatggtagaaaagttccagggatattctcattggttcacctttggtcaagtgtccatttccaaaccaatcattgtggccaggaggatgggtccatttccggaccaatcattgtggctgactgacctcttggaaagggtgggtagaaccagcctcctttatgtatcacagagagagaatacattatttgttgaaaaggagagttctgttgctggaagaaagggaagaatgtgtgctggaggacaaaaacaagtactttaatgttacagcttgctaattgtccactcttgctctccaaggcaaggattcatgtctatcttggccaccacagtaatcccagcacagtgcttggcaagtggccaatactatgtatctatgttctcattaatgaataaatggacaaatgaattaggtacttcagcaagttagttggcaaaatgtgcatctttattgggccttcctgatagtcataggtagaacaagctttttttttttttttaaggaaaatcgaggtgaaatttaccgaatgtaaaagtaaccatctaaaagtatacaactcagtggtgttcagtgcattcacaattttgtacaaccagcagttatatcaagttctaaaaaattttcatcaccccgaaagaaaaccccatgcctattaaacagtcacgccctacttccccctggcaaccgacaatctgtttctatctctgtggacttacctattctggatattttgtataacatattgttcctttctttggttgtttttcttttttttttttttgagacggagtctcattctgtcacctctgggaccacaggcgcatgccaccacacctggctaattttttgtatttttagtaaagacggggtttcaccgtgttagccagaatggtctcgatctcctgacctcatgatttgcccacctaggactcccaaagtgctgggattacaggcgtgagccaccgcacctggccctgtttcttaatgaaaacaactgaggccgggcacagtggctcattcccgtaatcccagcactttgggaagctgaggtgggtggatcacctgaggtcaggagttcaagatcagcctggctaacgtggtgaaacatctatattcccagctactcaggaggctgaggcaggagaaccacttgaacctgggaggtggaggttgcagtgagccgagatggtgtcattgcactccagcctgggcaacagagcgagactccatctcaaagaaagaaaaaaaagaaaacatctgaatgcatttatggggtattattcttacatttaccaaactgaagaaaaataatatttctaatatttggttgcaaacagcacacaccagcttgggccggcttaactgagagagttccttctggaagccatgcctagtcagggggtctggggccagggtctgaagacttgccagagtcttgcactgtcttttgtttctgtttctttttatctatcagtttcttctttttctgttcagacaggtttcccttgctttttagaacacatggtagaagatgccctttccccagctaccattttaatgtcccttctgttccagccacattcagaggctatctggctcaggatcccacttctcaatttctaggagagggaatcaattggtccagtgtggaccagtgtccccccttgtcccaaactgtgggtcttggggcagggctatccagtcaggtgacaaaggagctttatagagagcagagggtgacatgagtccaaggcagcagagagaagaccagcagccactcaaaggctaggtttctcatctggagacctgcctcttgctcaaagccaaagggctgctctggcctccctcagcatggttgtaattgattttgctttagtagattccaggacccttcttgagataataaaaaggactaacataaaattctcccaaacaaaatcaattgctttcctttttgcaccagcatacagaggcggtctgccattcctctcactgagcagactccagaagcatggagcccagggcccaggggaggcgggctgcctggtgtggagggcatttgtgccagtgcgaggcaggtttcaggtggcagtctgaatcacatgggtctgagtctcatgtccgtcttagaccttcgccccatttcttggtgcaggagcttttctactctcctgacagaagtctttgcagttgactggcttcccagtgccagaggaaaggggctaagtaatggtggtggcaggttagaggtagagattcccagctactctgttcacaaaaggcaccttctgggcattcaggagaatggcttccacatcttcaggtggtctgtaagcatctggctgctgcaggctcccctgacagctaagcagaaagggttcttttctgggagagcaaggaccaggtgctcagcagcatacctggaactgtacttccaaattccaggtgagtgcccgcctccagaacaacccagctgaggtctctgtatactccacaggttgaggaaggagaatgaacatatttgggagctaagccaaactatatttggattccggttctgttgcttctttgttgtgtggccttggacaactccatctcagcgtcctcatctataaaatgagactaatcatgtgtgtcttttgttctattgatgcaaggatcatatcaggcccagagcttagcttggtggcacaaaagagttatgcttaccctaaagaaagaaaagcgattgaatatattattgcatggggaattaggagaaacacgtgctgctttggttcatttagtgtgtctctttaacaacatctaagctcatatcttaaattgctgattgtctctgggcaagggccttcaactcttttggcctcagttttctcatctgtaaaacgaggctataagataaaaccatccctgaggtccctcctggcagaaaagatcaggtacatggagtcctccaggacaggagcaagagcctcccaaatcctagccaaggctgaccacttataagactattagacactgagggtgcctggctctgactctagcagtctggaaagacataaataagcagggagggagtggtcctgaagagctgttttttcaatgtatgtgaagagaagaggctgccctgccattagactttccagattttgtgcttggctaatgtagctcaatgttgccagtccaagacttgtaaattacaaagtttttttccataccaaatgccagttgaatatgatatcaaaggtgacttgttcatcttggcaacttacaatgagcgtagagaattatcatttctataatgacttttccatgcggtttcagaacagaaaatccaatattgtggaagatagttgaccagaggagcccagagcagcagtatcaccatgatatggccatttctatggacatccatgaactctcatttgtaatattcaagaaaaggtttgagtgtgatgcaagagccaatttatttgctccaaggacagccctggctttattttattatagacgacatccttcataaagcccagcccagggcagtcatttcccctgggaccacaggcttcctacaggcctcctggagtagactgtgacatggttataaactcctgtgtatgccaggtgactggtgggcactgctaggtgctgagtgaggaggtggcacagtgtagaaagagaacattggagctcccagtattagtcctggcacatctctttgctgtgtggttttgggtttcatctctctgagctcttcttggcctataacatagggaagtagccctgtgctccctccatcaagagactgtcaggagaaagatgtgagataatgtatgctgaaaatgctttgtagactgtatatatatgagtggtattctgcttattgcaaccacggttgctagctgattattatagttacttgacagtggggataccagcaggctttgggacaaagaaggggattctgggaggagttgtggggcactagggaaaggctgtttacttagctacacattttatccgtggtcacccagctaggaagtggtagggtcaggtcttaaccttgcctacacccatgcaatctcaaattccctagttgttttttaactctgttctgtgcaaccctagattgttcatggggacttcagggagattctgcaactatctgattatcactgttttaggtgctgggggacatagcagtggtattgttacttaatggtcccatgacaggtcatgtactaacaggtagaattggaacccacatccacctctggcccagtgatatccttggttactttagttattcccaaatacgaacatgtaaaagtgtccaaaaatctcatgctcagggaaagcctccagacatttctgatgatgtaaggttcttcttccttctcccttttctggggtttggtgatctcctgaagagcacatgttcaaacatactggctataacttcctttggcaatgtgggagaccgctgattgagagcagaatgcttgtccttgcaaagttcaggagtaattaacatggtgagaaggggaggagagcaatttggatttcattgcttggcagctttgccccttgagaatactttgtggctggagaaatgaccctttaggctcactgtagcatttttctttgaataaatgacaaacatccatcatgtaatacatcccttgcaacatttcagcctgtcactaatgaccttattgtaaagaacatttgatttaagatttaaacctttcacgacaccctctcttagcttgaatacatacatttgaaataaaattaatatggttttagcctgcggtcaagtagtaaattcatgacttttcttggcttaagaatcagcagtctcctccctacctgcttctccaattctttaaaacaaatgtgcttaaatcaacccttgctgagttctggaaatatatttagatggcttcatccatttttgaccaactgatggaatattctctgaggtgtcaaaggaattattatcttattttaggagtcaagtttggagcagcaagtgtctgttattctctctgatagctgcacatcagattctaaactgatggtcctgtggctgaggaaaaatgatttaactcaggagaaaagacaatgaatattgtcgtggtatctgacagtgtctgtaaagctgaagaaatgttgttgcttctattagaaactttactttttttttgagatggagtcttgctctgtcacccaggctggagtgcagtcgcatgatatcggctcactgcaacctccacctcctgggttcaagcaattctcatgcctcaacctccctagtagctgtgattacaggtgcccaccaccatgcccagctaatttttgtatttttagtaaagacggggtttcgccatgttggtcaggctggtctcgaactcctgacctcaggtgatccacttgcctcggcctcccaaagtgattgcaggcatgaggcaccacgccgggcctagaagctttacttttctatacatccatctgcaacaacttagtccctgcatttttaacctatgatgggagagatgtggctctgaccttggtatcctttgcttaggatgttctagtgtgtgttgtagttgcttcctaactaggccagtttcagggttgcaggcacatgcatgcagctttcctttgcttttattcctgcctgcagaactgtagtcactgaaacttctcctgagttcctgccagctccttgaggaggtcttcggcactggatgtcagtgggtagtgcaggtgtcttccctaggaaggaactttgttcctcactgaaatggggaaagtgtctacacttgcatcatgactttccaagtcctgtgccaggcactgttgcaggtgctgggcatacaacagcaaacaagacggatgtggcctgtgggctcataatggttccgtccagcagagaggtgggtaagccgacaggcaagtgctagagaaagttgataaatgctgagagggaagcacaggatcctgtgggaacatacggcaaggagaatttacctagtgtgggttactgggaggtcctctggaggaggtggcatttatgctgtgtgtgtcacactggagcatggaacataagctgcaaagcaagggtctggcttctgctcacaccaccttgcagagattgtcatggggctcttattccagccaactcctctttctgggactgtggtcagaatcaccctaccttcaccaacctttccagaaacattctctttccaaaagtttatatatcacattttctcttaagttgacatccctacatcccaggaggcccctgtttcctttttgcacacagaacactgattccttagatttcccagatatgcctaaactggcatcctcttagttgagccactcagatgggaaccccctaccccagatggagaaaagggtacacacctgggagctcagaccggttcaacggtcaggttatgggaaggagaaaagaccaacacaagctcatccgggtctagggaggcgccgagtgaagcctcgggcagtgttaggggtcatggccgtgcccatggactggctggatctgagagacatggccatgaccatgctgccccagagcaccagctccttcagagtgtggacgctgaccacgtggtcccaggtagggaggcttttgcggagtttggggtgcggcgccttttctgtgtaaaggaaaacagcccagccttttagagtttacatttcaccagagttaaatgtttcccttgaggtggttttaggggctctgtttcagcccagagctccttcatagacaggccataaaaggcccctgcctgtgtgccactggcccggggagtcttcccgaggagcctcttgaaggggctctctgcccgtggcctcctcagccttccatcctgcctggggtctgttcttgctcccctccctccgttgcggactctgggatgttgtctcttccctggacttccagctacattttcatcctggaaacgcagccctcgctctgaatccagcccactcccatgcccagccccttaaccctgagcccccagccctgtcctaagcgtgggggtctttgctctggaaaacacaggacaggcttctggggggtggggtgtcgaggagatggggcctggagagacattcattggtgacaagaactccaggtgaaagtaaggacctgcggtgaaaacccagattggagtgagatgggtatgtggggtggggaaagggggctgggccaccagagagtgctgctgctgcgtagtaagctggacaggggctcaggctctggagcatccaacgggagctgaagggacgacccctgcatccctcgtgccttccaagattgggtggagaacagatccccagatccgagaagctgcagcgctgacccagatccgagaagctgcagcgctgacccagatcactggcgggatccatccgccatccttcccctcacatgggctcctctaggcccgctcccgcatccctttctgtcccctcccacaaccacagcgactcttcccataaacaaccgtgacctggtcatgccgcctcagccgcctccagcatggcccgagtcaccgtcactcgcccctagagctggggcagtcccctgcaaatcttcacccgttcactctgccttcttcacgtcattctccacacaactggagtttaattcacgtttcttcttcttttttttttttttgagactgagtttcactcttgtcgcccaggctggagtgcagtgctgcgatctcggcttacgacaacctccacctcccgggttcaagcgattctcctgcctcagcctcccgagtagctgggattacaggcgcctgccaccacgcctggctaatttttatatttttagtggagacggcgtttccccatgttggtcaggctggtcttgaactcctgacctcaggtgatccgcccgccttggccttccaaagtgctgggattacaggtgtgagctcctgcacccagcctaattcccattttaaaatggaaatctgcttgtgccactgacagtagaatataaactcccaggctggccaagaggccctgacaatgtggttttgcccacctgcgcagcctcatctcctggtccttgtcttccctcaagcctgggcctgcagataccctggcctcgggtcccaccgttgtttcctggctttgttgctgcccccttttcctgagaggacttctccatctgaatgaggagccacagtgatgctctcccttaccagcctgtctgtccttcatggtaccatgcatgggaaccatgagtgtctgtgtcacccacttagccccatactctgtgaggaaagggactaggcatgacttattcaatctccttgaacagggcctcaccccagtaggcccccacatttgttgaacgacagactgatgtaatgggagacactctattgcgctgtccattatggcagccgctagcctcacgtggttattgacatttaaattcactaaaattaagtgaagttaaaaattcaggacctcagtcacactatccatattttaagggctcaatagccacatgtgtctagtggctactacactggatagtgcagaacatttccaccattccagaaagttctaccgggctgtgttgctaacaggtgcgaatatcagtccgtttactttggtggttaagaactgtaacttcaagttctatgactgaatttaatatttattgcaagcccttatcgggctgggtgaaggacacttaatgaatggtctttttggggtccttctcccatttcctgtgggggatggattctgggatctcacataatgccaaggtcttggtggtgtctccgctgtcgttcccaaggtgtcctcccctcatcccagcatcagtccatgaaggacaaattgtgctaaaattcttttaataaaaacgagaaaccctgacctgcctatctcccacttccactccttctcattccccagaggcaaccctttccattttaaaaaaaatctatttctccagctttgtaaataatatgtgtatagggctttctcttcatttgcccactttagacattctctacttaattcctattatggtagaagagaatattttacctttgttcaccctcttcaatgctctcatccctctaatctagttgtattgcaggtttttgtgcatacaaagtgtttcattattataactacactactgtttttcactatggaacaggctttgatcctatgtcctttcttgaacaactcttttaaaacattaataattgtgacattttatttgctttcttgttttttttttgcatttctggctaagcctcctcccatcttccaataattctatgaagtagtctttgatacaaatgtccacgtggtcaaaactattccccctaccttggagtcatctctcttggagtcctctgtcctgctgccccaggctgtcctgggtgcctcaacctgctgcgtacacatcaccctggggtgcccgttacttctctcctgtgttggacattctgcttcctcaatcccatagctctgtttattatgatttagtccttcatgtgggtggagcagagctgctggcagtttcctgagacaagggtgcactgaggtattctttttgagtccatgagcatttgaaagtatcttttcttgcatcacacttgactgataatttggtgagggcaagaattttaggctgaaaataattttcagtcagaattttaaggtgttgcttcattatcttctagctttcagtgttgcagttgagaagtcctgtactagtccatagagctagtgacgagatagggagagacaggcagagagagaaagagagaaggagtaaggtggagtggagtgtatgagtcagggttctctagagggacagaactagtaggataaatgtatacatgacagggagtttattaaggagaattgactcacacgatcacaaggtaaagtcccatgatagaccgtctgcaagttgaggagcaaggaagccagtagtgggtcagtccaagtcccaaaacctcaaaagcagggaagccgacagtgcagccttcagtctgtggccaaaggcctgatagcccctggcaagccactggtctaagttcaggactccaaagatgaagaacttggagtctgctgtttgagggcaggaaaaaatgagcgcaagagaaagatgaagactcagcaaatctgctccttccaccttcttctgcctgctttattctagcagtgctggcagctgatttgattgtggccacccagattgagggtgggtctgcctctcccagtccactgactcaaatgttaatctcctttggcaacaccctcacagacacacccaggaaccatactttacatccttcaatccaatcaagatgacactagtaaccataagaggagagagagagagaaagagagacagagagaccgagacccaggtggaaactgcagtgtcttttataacctaatcttggaaatgacttactgttgtttctgctgtggtcacacaaactgaccctggtacaatgtgcaggaaataatgcaaatgtgtgaataccagaagatggggattgttgtgggtcatcctaaagactggccatcacaggatctattgtttctttatggagactctcaagaagccccctgtttttagtgccccgcctttcaagctgtctgttgcctccagtctttctgcctctctgagggtctgaggggtgaactggttttcttctcgctgatgatctcttcctctggatgctcagttttgacttttctctgccatgcccttttccattcctccatccttctctatttctatatgtcatggtttgattttacggatattttgtagcctcattaatttggatttctggtatctttttccccttgttattttgagataattttttagaaggaaagggggtggaaggagttttatgttaccattttggaaccagaagtctttccaggaaatctccagctagtccagctttgctcttcttcatgtttcttctatgccccaaacccactcagattttaagattttcagtcaaaaagccaagaatgactcactttttctctctgtattttgctatgtgatttcttccttgaaatggtaactatagaatgaatgctcatattcatggataaagaagagcaaagtataaaggaaatgcatggaggtgggaaatcctggtaatttatcaaaatgttattttatgactacagttaaatattgaaaaaattaaagctgggtgccgattgctcatgcctgtaatcccagcactttggcaggctgaggcggttggatgacttgggcctgggagtttgagaccagcctgggcaacacagggagaccccatctctacaaaaaataaaaaaaattagctggtcatgatggtacatgtctgtagacccagctacttggaggcggaggtaggaggattgtctgagcctgggaagttgaggctgtagtgagccgtgatcgcaccactgcactccagcctgggtgacagagtgagaaaaaaaaattaaagatcaggaaaactgaaaacatcagagaggagttgggaaccaagttatgaggtatgctttcaaatttaaaatagcaacaataagaaacttcaacctgaatgttgaaaacaagaaagagaccgtggtaggttaactagggaatctctaagaaatcttggcattccaacaaatttctgactcagggaaaacctagttaaagagatcaccaggcagaccactcactttacaaatggggaaactgaggccagagaggagaaggccagagaccaaagtcacccagccagttaatagcagagatggaatctgaactttggttttaactttggtgtttttatctttacaccatgaagctgtctacatttttataacatccctcctttttcataatttggtaaatgttttgacaattatttcttcatctctttatttctgaagagcaagaacataatttttactgatatccagatggccttctctctgccatcattcttgatcatggcagctctgtgcagagaatagataaagaacttcaggaaacacagtttgaaggcaagaagtgatcttcactgcaggacttcacagagcctttacctggttagtacacactgtgtctcttcatggagacgttatggtcagtgtcctggtcagatcagctgcataaggtggtaccacacactgagtggcttgagaaatgggaatttattttctcacagttctggaggctgaaagtctgagatcaaggtgttggcaggtttggtttctcccaaggtaattgctccttagcttgcagatggccctcttctcgctgtgtcctcacatgatcttttctctgcatgtacacctcctgaatctcccagtcagatccctaaagggctccttttaacttaatcacctctttaaggccttatttacaaatacagtcacactctgagatactgggagttaggacatcaatgaatgaatttaggaggggcacaattgagcccataacggggtttccccatcttagtggatggtggaatcctttgccgtgttgaggaatttgtattttaggaaacagtctttgtggaaaggtgttccagggaagcaaaataaacaggccacagctgtgaagggccatggagctgcagtgatgtccatggactggtatgagtgatgtcatgacagaaatcaggagcgtgtgatagaacggagtctctgtctgtcagtttctctctcaccgctatttctttctgctggatttcattaagtttcattcccttttccttcaggggagcgttctccatgacccccaaagcaagagagtattccctgtcagctccagtgtaaaaagactgtaatggcctcagcttgggtcacgtttgttgagggatatttggttcttttattggccccaggttgggtataatccaggaatgggaatgaaagggcatgggatgaataaagataacatccaccgcagagaagatagaaaatgccttttcattgcagcgagaccaaaggagggacacagcagtccaatcccaggggatgcagagcagatggagaagaaaagggtcttctagcatttatgttgtgtcagccaagatttgtcctgtgtttttaatgtaatggtcagttaggtgtggccacgagaggagacacaggagagcctcaggaaaacaaagctgactgtactctcaggtcctagaaaggggaggcacagcctatgggctagtttaaataattttagtggactacaagcttaagggtggagttgctaagaatgaactttgtgtgtgtgcaccaatggccctcagttgcctggtaccagttctgggatgatgaaggcagaggaatattgtctcctggggatcacaagccagatagaagaggtgcggctctatattgattggtttgcgtatctaaggcacatcctggctgatccctttgctctctgtaagaattggctagctcagggaggggcagtctcttcccacttagaaatgttattaagatatctaaacatggctggacatggtggctcatgcctataatcccagcgctttggatggccaaggcagacagatcatttgaagtcaggagtcgagaccagtctggccaacatggtgaaaccccatctctactaaaaatataaaaattagctggtcgtggtggcaggcacctgtaatcccagctacttggaaggctgaggctagagaatctcttgaacccgggaggtggaggttgcagtgagctgagattgcaccactgtgctccaacctgggtgacagagcaagactctgacacacacacacacacacacacaccccaaaacatcataacatacagaaaaaaaaaagacaatacaagattcaatcagagaaacggaaccctgggagatatacacatagttacgagtttactctgttctcaattgtgcaagttggttaaacagtctctattaggcttttgtcttatgctgaagcttgaagttctcggggcaggcagtcaggaagggaggatggatttcaagtgggggagagtaaagacaagctggaacccatgagcatgagtgagaacccacgaggacagactagaacctgcagcattctcactgtctccagcctggatgatgtgatcatactgtggtggaggtaggagtccttcatcacagagctaaatgcacgcctggcccacgagtcagagagggctaaggaggctccaggggaaagtgggacagttgcagacctgacgctgcccccgtgccaatgaggtgagtcatcagataagtgacaacctgtgagctacaaaaacagcgatgattctgccccaacctgtggtcaaacctaatgggaagccacggggaaggaaattttgggaaatcatgttcagcctagataaactgacagatcacagagccacctcatttgttcagctggagcattggatggtaggaggtgctaagaatgaaccgtgtgtgtgtgtgtgtgtgtttgtgtgtgtgtattgtgagtgtgtgtatatctggagcagggcagtggctgtggagagaatgggtagacagtgcaggcagaagagctggcaaccaccatcacaaggtggagggagcttgtcctgaggctgacctgtgggagactcttgttccctctgttcaccctccctgctggccactgtgagctgcccttgccattggttctgtggagtgaagagacagtggaaagcagcattctttactatttatttatttatttttttactttagacgttcaaattctcccaaggggctgtgggctggaggtccagaacactgggccgaggctggagacactcaaagacgttgaggtacaccgtttggggaaaggaagatgacacgtggacactcaccagtgtacagccatttttcagggtaaggccagtcaagaatcagcattttcaaacacattttatcagcagcagtggttgttttgtggttggtgtatttggccgtagtcaatttgggcacacagtcttgagtttaagggtaagagcaagccagtaagagggaaaataaagaagactacagatttctgggtatcaggtcaaaaacattttaggtgccaaagcgtggctcgtgatggagtatttgcggctgagctggggagcgcaacagtattttcatctttaggaattctgaaggaattcctgccttaagaattttcctggacactgttatactcaatagttcctgatttagagaacatcgatggctgtctttctttgtgtctgagagtagagggcctccaccattcatcatagcatacagaaaaaaaaaaagacaatactaggttcaatcagagaaacggaaccctgggagatatacacacagttacaagtttactctgttctcaattgtgcaagttggttaaacagtctctattaggcttttgtcttatgctgaagcttgatgttctccaggtaggcagtcaggaagggaggatggatttcaagtgggggagagtaaagataagctggaactcatgagcatgagtgagaatccacaaggacagaccagagagatgattttctgagagatgattatgtctcaggttctattctgtgtgagatcctgggatatagtcctgaaccttggggggctcatgggcacaggttttgagtgtggggaggaggtagaatcagctgggaagacaacatattaagttacagcatgataaaaggtgcatagggtcaggtgtgacaaagcctagtggttttggtcaatggggtgtagattattagcttccctcctgcttccgtggtccttttcagaccattactcatccgtcctcacaaaaaaccctttctcttctgaggttatcctcattcggccaataaaaccaataggctttaaagagaaggtgtcaatttgtctgagctcaaaggatgggaagttcttccagctgaaaaagatgaggggagaggctaaagaagggtattagaagcagagcaaagagtagatccaatatatctttctcattttttttttttttttgagatggagtcttgctttgttgcccaggctggagtgcagtggtgcagtctcggctcaccacaacctccgcctcctaggctcaagtaattatcctgcctcagcctcctgagcagctgggactagaggcatgtgccactatgcctggctgatttttgtatttttagtagagacggggtttcactatgttggccaggctggtttcgaactcctgaacttgcgatccgccctctcattttaggcttctgggcacggctttcagtctccctcagtttccagtgagattaccctcctggctccagaacagtgccttgttgcccatcacgtgggagaatctactattctcagtgttttcaatctaccttctagagttaattctcctagtaactctgtttctaggaaatctcgtccttgaaagcaacagagaaagaaatcaatgaactgcaaggcgcccatttagcattgagactgatttaaagtaggaaaggtacaaagataaatgtctgtgtgcaaattggggttcttttctacaattatgtttgcataagtggctcatggccaaagatttcccctcgtagaaggttgagtttttttttctttaccaagcccagaagtttaattgacatgtagtttgtaggctcactaaataattcaatccatttgccaaactagaccttaaattaaaaacaaaacaaaacatggtttcatacttttccagctttatggttgttgatcatccataatttcagaaacactgatatggtatgcaaaggaagaagcctttgattagatttaaacagacatcttgaatagagcctgaaatggggaaagaaagctgcactgccctttgattctgcaaaaataaaaccaatttgccttaaaaaaaacttgtctcaatttttttctttcttcatatttgcaagttaaataggattaaatcccaatcagccattcattatacacttgctaaatatgtagacttagacttggttaagagtccaagttgaatgtcaggtgctttgatttacaggaaacttctggagttgcttgtggtatcatcttttcctactcaaaaaatgtatcttgtccaggcacagtggctcacacctgtaatcctagcactttgggaggctgaggcaggcggaatgcttgagatcaggaattcaaaaccagcctgggcaacatggtgcacccttgtctctacaaaaaatacaaaaattagctaagcatcgtggtgcacacctgcagggctgaggtgggagggtcccttgagcctgggaggtggagtttgcagtttgccgagatcatgccactgcactccagcctgggcgacagagccagaccctatctcaaaaaaaaaaaaaaaagtatctctttgtttttttcataatttagaactcaaccttcacatctatagacaacatataacttttgaaaatcctgagcatggccaaagatattggaatgcataacattaaggctgcgtaaaagaaatccatacattcaaaatatctaaaaatcaatggctactcataaagttctaatgttttattttttgatattcattttaacttcgatttcaattttgaggccccatagaatgagtatttggtttctttttgccaccatggagaagatattttgaaaatgaagaatctgttttcgtggaggccaaacatcagtgataaacgaagttctttccgaacatggtcacctggggactgagatgtcaaaccagatcactgttcaagagaggaaatgaggtttcatcagctacctggctgcctccagagcatggtcagaaggtgtttattggatggaaataaaaatgcctcttttttttttggcacaagaatttcggctaaaataagaccagcaggacctctatgctgaggccttggtaaagggacacacaggataaatatatgtacatagctggctcaccatgccgggaactctgtattcataacctgtgactgtcctaaagggacagattaaaattcaaagcatgcggatccttggctgtttgatttcagacacaaaattggaaacgggctgataaacatacacagcatgaatctcactcccattccctgtgttccgttatgctgggctcggcagtgaggcagaaccccgccaactctggcctagaaggattcccgtctccccccatgggcaggagtaccaccgtttcaatgaagagtcttctaaactacctccatttctccagtgtgtttgaaacagacgaggtctaaggggtccagatgggtgcaagctcatgctgatttggctacgtttccgtggactagggggatgagaggaggctcacctacgcagggatgtcctcacatcctttttgggagaacagccaatgaggtccacaagatcttagttacaaacgacaccaatgatacttccagggcatggtgactccatctcccattattgttgggtgtgggcaagttgtggtctgatcaatggatcagattctatctctttctctgtctgccttctaattcttggctttttggaatcaagactcaactctgtatttccttaaatgggcaatttttgcattaatcattgaaagctcagacagcagggctggcttttcttgctgaacaattgtcttaggtctaacgatagagaaagacatttctaaagttcccaaattaggcactgtcatgtatgttttgggctttctgtagccttggaggaaatggacatctttgcttctaggggcagagcagctggcagcattagaccctgggcccatttggtgccttttactacactaggctgccagcttccagggcaaggaagtgggaatttgtgattagatattcatggagttctcattcttaatcattaggcagtttgttattaatgattcttgggtattccaagcactaataaaactaatggttgcttttgaatatgagcagagttctggatcccttttagagattgggtggtttgtcggccatgcatggtgtctcacgcctataatcccagaactttgggaggccaagttgggtggatcacctgaggtcagcagttcaagactagcctggccaacatggcaaaacccgtctctactaaaaatacaaaaaaaaaaaaaaaaaaaaaaaacaattagctgggcatggtggtacgctcctgtagtcccagctactcaggaggctgaggcaggagaatcacttgaacccaggaggcagaggttgcagtgagctgagatcatgccactgcactccagcctgggtgacagagtgatactctgtctcaaaaaaaaaaaaaaaaaaaaaagatggttgtcaaatatctgtgctttggagtgagtgtcggcccagattgccttttttggagattgctctctctctcccaggtgtggagagagatatgagtctgggtctgtcctctgccatctcagccccttaaccatagagctgattgagctggggcagacacctaagtcaggggtatcaccaatgcattaagccaaccaatctctattgatcaacagaatgaaagggtatagagactgactggatgggatggtgttgggcaagggacgttcatgcaatgttggggccagagttggagccagggccagcgagacccattggcaaactgaaggtattaggggagactctagagccttgccccaaagctggtcttttgagaggattaagtggagagaagcagagatgtgccaaggtccagacggagagttgcaggagtttcccagtcctttgcgacccagtttcctgtctctggatgcttgattgcttattgtagccctacaatgactcaatctagcccaagagagtttcttttccttgaaagcaaacaacccctgaccagaagaatgtcacagatgacgagaggtgcctcatcacagaatcaggaacagtcagaatctcagtgggaagctatgcagcttccaagtgcagcttgatgagtcagctgtgaagacagggtatggtaagtatggcatgaaaggcaaggcgcacctatgcaatgatccctccaggcacaagtgtcccctgggggtccagggggagtaggaaaggagggaaggttaccaacggcctgtcgggttccaggcatagtgttaggtgctttacatatcttgttttgttctttggtaatattgttgggttgaataatgacccctacaaatatgtccacatcctaatcccagaatctgtgagtgataccttacacggcaaaagggactttgcagacagaagttaatgatcttaagactgggcttatcctggattatccacatgagcctggtataatcacaagggcccttccttgtaagaaggagccgaaagggtcagagtcagagaaggcaacgtgataaagcagcagttggagtgatgtactttaaagacggaggaaagggccacgaaccaagaagcacaagtggctgttagaagctgaaaaagcagggaaatgaattctcctctcagatgctctggaaggaaccagccctgctgatatcttgactttagcccagtgaatctgaattcagacttatgagctctagaactgtaagagaataaatctgtgttgtgttaagctactaagtttgcagtgtttattatagcagcaataggaaactaatacggttgtatttttataatcctcatttttacaaatgaggaagctcagtcaggttgaggaacttgcccaaagacacacagctagcaagagatggaacaaaggtttggtcctgaactaggctgtcagactcagagcctctgcttttcccactatctgattttgctgcctgagcaatctgctttcctgagcacgtctgcacacatcaaaggctctgtctatgtctgctggatgagtgcacggtgttctggagtcagaaggataggtggcatgacctgtcaatagtcttcctttcaacaactgtgcagaaatgcatgcaaccttctatggccccagcagctgggccctcccagctagatctggcatccgcgtctcttaggtgcctgcttctttcaggatacaggagtgggtctgatttattatggtgcattccccaatttcatgccaaatgattcaattacagtcaccctcagcactcaggagaggcttcctgctggctcacaaagatgagaccagaggtggcccggagcatgtagaaaaatttcaccttattatttattggagggggaagtggcatttctcccactttggagtaggtttgttaatcacaatgtatgagagaagagggaggaaaaatcttctcattttcaaagcgaagtcaggttttaatgaggaaatatggtaatgtttttactttattttccctggctgcctgtgtctgtcagctcagggttactcctggtctgttgaaaggaacaactgtttattgacttcccactctcatgcaaacaatggctcccatttattaagtatgtactgtgtgccaggtactgtgctgggcaatttacaagtaatccttaaactgagcccggaaagtgaatgttagtatgcttatcttccaaatcaggaaacagaggctcacataaatgaaggaatttgcccagtaacacccaactggtaagctatgatttacacctaggcttttctgaatcaggagcttttattctctccagaagtgatagcaggattctttttcttttttctttttttttttttttgagatggagtctcgccttgccgtccaggctggagtgcagtggcatgatctcggctcactgcaacctctgcctcccagttcaagtgattcttttgcttcagcctcccaagtagctgggaatacaggcgtatgccactacgcccagctaatttttgtatttttagtagagacggagtttcaccacgttggccaggctggatttgaactcctgacctcaagtgatccgcctgcctcggcctcccaaaatgttgggattaaaggtgtgagccaccatgcccagctgatagcaggattcttatttgggtattttattggccactctatacatcctgcaggtcttagctaggatgtgaattcctagcttcatgtggcctcttattccacaaatctaggccttccttagtgctgggtactcaccccactcagtgcctcgtggccatattgtaattgtctgctctttctgtgtgtccctgctatgccgtagatccttgaagaaaaaacacagcatgctgtgtccagcacagagcaggcactgaataatcgcttgtggaatatataaaagaatgaatggcatccatatttacacaaatactgtcactgaaaattatcatgaactttagataccatttagggaagacaccataatttgcaaagtgcattcaaatatcccttttaaaaaatacggaattcatgaagagtgatccgaatgactgattattatgagatttttggaacaatttattggtgtttagctaaaccttaaaggacttattgtaccacgtgcaagagagttccctaaagtgatcaaattggttttcttaatgctgacattccctgcagattgacacagaagggctgtgaaaacattgctttgcttccagattgtatttggaattttattttcaaagcatctcttcggatgggtccatcctatctctccttttcttgctcaaaatttattcctctgggcccatttgaatgcaagcacgttaagggcaggactgtgtcttgttcactcccctatgcccctggcacctaggacagttcctagcccatgggagcttctcaattaatatgtgttgattcattagtgggctcttcctatttgatatagtgaaaggatcagagagggcaaaaaggtctcatgcaggagtagtcgatggagatgcagaacctgtcagtatctcactctctaatgtgctgcttatctggtacatccaccactcctggcccatcaagccgggtgagaccatccacacgcattgccccatacctctttgcacccccaaacaagtcctgaatgctagaggatgttctaggcactcatgaggtcttcccttatgactcatgtttgtccctgacatcctctcccatttatcttgtttatctccttgttccaaactccttgacatggcctcaagctctattcctcagcgctgatcctggcccacggcctttccttgaaaccagaccgcctggatttgaatcccagcttcatccactgcctagctgtgtggccttgtgcaattccttaacctctctgctcctcagtttcctcgtctataaaatggggatatgagctatgcttgtaagagggctgtggagaaaactagataaattaatatgcatacagtgcttggaccagcacctgataggcagtaaactccaaatccttatttgctgttactcttattatgtggtccttcttgggctctcagtgtgccaccagaaaaagataggcagagtcttggtgtaggacaaagcccttggtaatgtccatgacatctggtggggtgtggttatgtggactattgccagaatgaaagtcttaccctcactcgaccaagaaaaacacacaaagtccagagggtataagccatttccttcctgcttcgtttgaccaactttctgtccatatcgaactcccattactagatgcctgggaggctgttttctctctgacccccttccttcttgtccgcttcccaccctgggatcgtcttggtcttttcaggctcttgcttctccccacagagtcgcagctccaccttgaagggcttccgtaggcccaaccctgggcactgcaggtcttgccaagtcttctgagtgaaacctccatatgaccaaaaacccttgctttgtcattatctacagcctcttaaaggagaacctgggggtgacattatcctaacaaagtgcctctttttcagccttaccaaagaccttgactcaggaagaagtgagtgtgggaagaagagaatgagggagcagggaaggaaccccattctgtttcatagagctcaggaagatcaccttctcccatggtgggtcgggtggggtggggtgggtggtggtgatgttgtcagcctagaaggagtgaattgcttgggatctagctgcacaccggggtataatttcaaaccatgcagccggagcctgattctgctactaaaaaccacctgctctcatcagcatgcagaccctgatggaaagagacactaatttacaagaagggtgccaagtagcagacatgtgtcaatacaggactttcaactcaggcgaggaaataaatctccttttggaattaatgtcatgattgacttcagagcatatgaacttgttatgcaattgatctctgagtaaagtgagcatatgaccaacaggtacagcatgtgtctccctcctattttgttcactgcctcctcttccccatttcaccgtcctcttcttcctctctgctggggaagtctggctgaaccagggagatccaatctgtttttctttttaatgataccctggaggaaagatacgctaaaacaactttgacttctcagccactgttttaactgttgttgtagtcataaggttatgtcgtaggtctgacttgcatccctcatgctgtactctgggcctgtttctattagctcagatcactgtggagaggaacggcaacaggctctgaaaagtaaagactgtatggtctgtgcatcctcagatagctccactgccagttacatcatccccacacgcctcctacttgtgcctttctttgcttccaccacgatactttccacttcccttctttttctttttttcccttttttttttaaagagatggggtcttgctctgctgcccaggctggagtacaatggtgcaatcatagctcacagcagcctggaactcctgggctcaactgatcctcctgcctcagcctcctgagtagctagggttagaagtgcctactcccacacccagcctcccttcctaattagacctgcaagtggtgacaggttgtggaaacctaggccctgggaccctgctgatggaaaaagggtggaagctgaaatgacaagcacactgctaagttttaggaggctgcatgctctggctttgaagcttggtctgatttatttatgggccggcctctgtcatccagagtagagcattatatcagccagtgtgctgaaggtgcccccagtggtttatggctgtgataatggagttgttatgggccttagtgagctggaatttatcaaggctcaggttcttctctgtgtagctggctctgagatgtcacttaacctttgttaacaacagcagcaataacaataataataataataaaaatagctcatgcctgctaagcctttaccaggtgctgggcacatatgttaacacttaatatatgttatttcatgcttctcaaatagtcttgtaaggtagacattattttgtcaccaatctacaaaggcacagtgtacagctgtgttgaagttaagcagtgttcccaaggccatgtagttggtaggatttgagctgggaattcaaacccagagagtctgaatccagagctcagatgctcattgctctctcagcagccacaggaagaaggggactctctcactctgacattgacattgaggagcttcatattcttggcagactctgacgtgtgtgtgtgtgtgtgtgtgtgtgtgtgtgtgtgtgtgtttgcatgagtgattgtagtcagtacaggagcaccgtgagctgtcccagttgatggcgctgggcactgatgcaccttggcctttgcctgcccagtcccactcccttgttctctagtgtgcgtttctggagttccttggagggagaggccagggatagaaaacccaaggtaattccccgaccccactccatggtaccttcttccctggtgctaatcccatcctcctgtcggtttctcatatgcaggctcaatcagcgcttccctggggaccatgctttacagcacacagagggctttaatgtgcacaccttatttagaccccagagcatgctgtgaggaagaatggctcagataggagaggcagagagcatgactaataaaaataaggcaagggattaagagacttgaaggttcccaggacaagctattgtcaaattggtgaatattaatgcagctaaaggaagaaggagtccaacagaaggggaactgggaaaatgaattatggcacatacttgtaatgggctatcatgcaaccattaaattaatgatcaagaaggcaagatggcagcattagaagttgtttaccagctgggtgcggtgcttcatgcctgtaatcccagcactttgggaggctgaggtgggtggatcacttgaggtcaggagttcgaggccagcccggccaacatggtgaaaccccatctttactataaatacaaaaattagctgggtgtgtttgtgcaggtctataatcccagctactcaggaggctgaggcaggagaattgcttgaacctagaaagcggaggctgcagtgagccgagatcgtgccactgtaatccagcctgggcaacagagtaagactctgtctcaaaaaaaaaaaaaaaaagaaagaaagaaattgtttgccacatattatttagtgaagaaaaaagtgaccaggaagcatatacaacacagtgccagtcttatgaaagcatatatgtgtatgtgtgtgtgtgtgtgtgtgtgtgtgtgtatatatatatatatatatgcatatatgtacatacttatgtgtatatatactaccatgtatagaaaaaaggttgaatgtctgtattccaaaatattgaccaagtcttcagtcaattatgttgaggtggtggattatggctgatttataataattttctttagtgtagttttgaagtttcctaaaatgaacttgtatttggaataagataaacacttattaaagaaagaaagaatgagccattaaaagggaggtgtttagccatcaagttatgccctgggtctgacttgcatctctcatgctgcactctgggcctgtctctattagtccagatctctgtggagaggaacagcaacaggtctgaaaagaagagactgtatgtctgtccatcttcagatacctccaccaccaatgaccaactttccttcctgggaaaatggggagccagagagagaacagaaaggtgcagtagacagcaatgtcctggtcattgagacctgaatttggggccatgaggattccaggccctgttatgtccagagatggaacatgagctgggcctcaccttggcttcccatttcccctggctgattccacacccactgggattttaatttgacctttgtgtgtcctgatattgggaaggggtgtgcactgatttagggactggaacattctagttacaaaaaaagaagaatgggatccaccatgagaaacagacactttggcattctgatttataaaaagtcttttatgagcttggttaatgggagtttgtccaagagagacaggtcaattaactcttcaccttgcaagctgaggaccagacctggggaagtgatgatgacgttgatggcctctctggccagagctggtcagctagcttttccctggcagtagctctctttggggaacagtatgatatactggaagggggttgaacttggaactaggtggatccacagtaaaatcctagctctatcttttattattattattattttatttatttttttttagcaatgtgacattgatatggtttggctctgtgtccccacccaaatctcaccttgaattgtaacaatcctcatgtatcgtgggagggacgtggtgggaggtaattgaatcatgggggcaggtttctctcctgctgttctggtgatagtgaataggtctcatgaggtctgatggttttatagagggaggttcccctggacacgctcttgcctgcagccatctaagacatgcctctgctcttcctttgtcttccgtagtgattgtgacacctccccagccatgtggagggttaaacctcttttctttataaattacccagtcttgggtatgtctttattagcagtgtgagaacagactaatacagacattgtttacttaacctctctgaaacctgcctttctcatctgaaaagtggatgtgataatacatcatggggttcctctggggattagatgaaatatggagtagaaagtccctggcacatggttggcatgtaacagtagtcagttttgtctgcaatatcagggatggcaggaataactgataacaatatccctattatccctgaacttgggtccagggagattctatagtctttgctcatggtgacacagtaaaagcagaccagggattgggtcttctccttgctggctgtggtttccactccaatatggctttgggtctgtctagggcagggttggccaactgtggcccacaggctgaatctggcccactgcctgtttttgtaagtaaagttttattgggaaacagccatgctcattcatttacatgttatctatggcttaacaacagaactgaggagttgtggcagtctgcatggcccacaaagcctaaaatatctaatctcttgacctttacagaaaaagtttattgattcctgacatagaacatcattgacttctaaggtgggaggaatttcaaaatgaggaatcatagaatcagaaaagtgaggaacccccaaaagattaaggcagagaatttgtgagaaaacactacttcccagggaaaggagcaagggggaatgaagggagaatatagaccttccacagacctggcaatagcagccaggacatattgggaaatggatacatctgcttcttttaattcctctgtctctgtgggggatgcaaagccttttgcagagattgtaggaaaatatgtcttgaaaggcaaaaggccagctctcgagatggtccttctgaaaatctggctcatgacagggctctcctctactatttatcttccctggctctaggcttggacttcaagactcagaacttgatgtttcttggaaattcatcatctctacagccaatgggtccccaagccttgtctactcagactccttaaatacatctccagtctgtcccttattctctatccccaccgccaccattctagttcatgcctcatcatctctcactaggatttctgtaataacatctgcccgtccacccatccatctccaaccacccacctgcactgaggacctgcactgggctaagtcctgggacaatgctgggcatgatacactctttgccttcaaggcctcactaactaatggtctttaataactgaatttccactttcagccccacttccacccaggttttccttcctccctgttgcagggtgatctttcaaaagcacacctttgattttgctattgccctagtcaaaacctttaataacttcccattgattgtaggataaggcccaaagtccttagtgaggcatttatgctcctttgcaaattgattcccaaatacctttccagccttttctcatacgaatctaaattttagtgagcaactcctagttattgtttaagctcaagataaggttttatattgtattaaggtaagtaatgctaggctctgctgaggtaacagatacactctgaaatctcagtgccttaacacaataaaactttatatactgcttttcctcagtctaatgtgacattcccggtttggcagctttcctgggcagctctcctccaagcaataactcagggatccaggcttctttcatctctacaagtgattttaagttcaccctggagccatccagccaggagatgagaggataaagtgtatggatgaggccaggcgcagtgactcatgcttgtaatcccagcactttgggaggctgaggtacacagatcatttgaggccaggagtttgagattggcctgggcaacatggcaaaactccgtctttactaaaaatataagaattagccgggcatggcggcacacacctgaaatcccaggtactcaggtgggtgaagcacaagaatcgcttgaacctgggaggcagaagttgcagtgagctgagcttgcaccactggactccatcctgggtggccgagggagactgtcaaaaacaaaacaaaacaaaacaaaacaaaacaaacaaacaaaaaaaacatgtataggtggattcttaggaagttttaggagccagatcttatatcactctgttccaattttattggctagaactcaattgtgtggccctgataactgcataggaggctgggaaatgtagttgagttgtgtgcccaggaggacaaagaaatgggtttgatggacaaatagcattatttctgtagctcaaatctttttttttttttttttttttttttgagatggagtctcattctgtagcccaagctgaagtgcagtggtgtgatctcggttcactgcaacctccacctctggggctcaagcgattctcatgcctcagcctcctgagtagctgggactacaggcatgtgccaccactcctggctaattttgtgttttttagtacagatggggtttcatcattttggtcaggctggtctcgaactcccgacctcaggtgatcctccctcctcagcttcccaaagtgctgggattataggcgcgagccacagcacctggcatagctcaaatcttaatgcgtttgtctttgctatttcctctaaactcttcttccctaaacaaaactctgaaagtttaagtctaaattcttcttatcctgtttctctgggtgggtgaacatttccttatccttccaggcccaggctaaacatcaccaatcccaggaagcctttcctagctctgcatgagcacctgtccccatgtttgcttccacagaactttgtgcattgtcaacaggaatcagacttttctaggtgccagaccctgttctgggctgtttattttaattttttaaattgtccatttctttattatccttcaaagtctaaaacttcctcaatgataaaacgaatagccactgatttctgccgcttcgtttattggaacttctagtctgatggcaaacattttttttacatttgttttattattaaagattcagagtcacaataaatacaatcagtaacctcctccatcccccaaagcccccacaaataccctgcacaagtgttaaccatctattacactttctttgttaaggattatgaaattactggctataaacagctcagtccaagttcttcaggctaacatcatctgtggcataactcggcgtcaaagagaaaccctagggcagagcagcaaggaccatcctttcccttacaggcacccctgcgatgagactatttctacagaaaactccccctgtggaccaggcgcggtggctcacgcctgtaatcctagcactttgggaagcgaggcgggcggatcacgaggtcaggagatagagaccatcctggctaacatggtgaaaccccgtctctactaaaaatacaaaaaattagccgggtgtggtggtgggcgcctgtaatcccagctactcgggaggctgaggcaggagaattgcttgaatccaggaggcagaggttgcagtgagccgcgattgcgccactgcactccagcctgggcaacagagcaagactccatctcaaacaaacaagcaaacaaaaaaaacaaccaaaccaaaccaaaccaaaacaaaactccccctgtgtcttcctgtccatctgagctccctaaatgcgtaactcttatgatcctcacacaaaccctatagaggtagatactattattatccccagtgcaaatgtgaggaacctgaggcttatgcaataaataagctcaaatctttttttttttgtccaggggttttattattccatcacagtccaattgtacagatttgttttctggtctgttattcctatggaactatgacatcctcacaggcaggagcctggttttattcattgtctatgcccccaatgtggcatgtcttcaggaactattattatatgaagaaatgttgccattcactatgccaatgtgcttattaatcagtgaatttattctatactaatatgtaaccgggtacactcaacaaatatttattccatggttgatttaagggctgaatcatcagccagtgatggatggctgttttttgtttttttttttttttttgaggtaggttcttgctctgttacccaggctggattgcagtggtgcgatctcaactcactgcaacctctgccttctgggtccaagcagtcctcccacctcagcccccccaagtagctgggacccacagccatgcaccatcatgcctggctaatttttgtatttttttgtagagacgggtttttgttatgttgcccaggatggtctcaagctcctgagctcaagtgattcacccgccttgacctcccaaagtgctgggattacaggtgtaagccactgcgcctggcctggatggctcattcttttagaaggggtgcatgaccaactggacaccacagtggtgtctgcaggtgctacagcagaaatctgcttttgatgcagcacttgccttacgagctgttctttcttgctcattgagggctttgtgtgctgctcttcacacagctgggctccattgtgatctgtcatgtaccaagttcagacatatttgctcctgatcccaagactcaagacagatcagatgtcataggcctttagtgtgacctacaggaaagctttcattccagcatttagtagggtggccaataatacttttttggctcagggaactagcagtgcagttcaacagatccaaatgaactgagcttgagtgaggtgttgatggtgtggaacagaaggaggcatggagggctcacgcattgtaaatgctcatcatctagggctggaggaggagaatgaagggtcaataatgcctacctgataaggttgctgtgaggagaaaatgagataatgtgggtgaagcacatagcatagtgatgggcacattagtaagtgctcaattagtattagctgttatattattatgaatgcagtacagtatgatgagtgttatcttggtgacatgaacaaaataatataggagcccagagtgtcccatcgtacttggaggattcagggagatattcatagaggatgtgagatttgaacaagacttcaatggataagtaggaatgctctggataggtaagacaatggtgaggctgggaatgggtattagagatagaggaaagtagaggtatgaacaattttctctctgagaataacaggtggcttcggtgaaaagtgtatagggtattatggaagaaaggtatggaaatgtaaaaggtggtgtggtaggcagaatatgcttcctgccctccaaatgtccacatcctaatccctggtacctgtgaagatgctaccttacacgcgaagaggaattaactttgtagatgggattaaggttgccaataaggtgatcttaaaatagggagattatcctggattatccagggggcctcaatgtagtcacaaatgtccctgaaagtagaaggatgcagaggaaggagtcagagtaatgcaaggtgagaaagacgcaactcactctgaactcaactggctttgaagatggagaaagaagtcataagccaagaagagtgggtgacctccagaaacactagaggcaaggcaaggcagggcaagggattctcccacagagccttcagaaaggagcatgatcctgctgacatcttgattttagttcagtgagacttgtgctggacttccaacctctagaactgtaagagaatacatttgtgttgttgaagccatcaaggttgtggtcatttgttgaagcagcaatagaaacctaatacagactggggagagaggatgtggggaaggagtctgaaaagtaggcagagccaggctatgaaaagatttgtaggttacattcttttttcctacagggcagagattctaaaaaagtgttctgtcctttgatatattctgcagaaatagggtttaaagatgaaatcactttgggtatcactgaatactcttgcccccatttgaagattcataaggaacattaataattcaaaaaccccaagaaatcatgcagcaaagagacctgtttaactttgtctgtcaagtatttcctcaatttatttgattatcagtttcctttttgtttttcttcactcaagaccggttaacatctcaaagcactttagaaaattctgctataggtgatgggaatgcatcagagttttaattttaaaaaataagtttattttttcagttgaaaaggtagtttaacctcattatgaaaaatagacaaaagagaaaaatccatggtgaattttatcacctcaatccaactactagttggtgtatttttatgtctatcttttacacatatctattcttttgcatatttttagcgtatctatatatcttctatgccttttactttttatatcatagaattttggaaactgtaagtagtatttatagtcatcataaatgtaattctttagtcaaggaaggaagataatgtgatcagattgtgataatatcaccacgaagatggagtgaggaggatggggaagatgagttagggagctgttgatagaatccagacaagataaaaagaagatctgaatcaagggaatagcagttgtgatagataggaagaattgacaaagacacctcatgggtggagggaatgtcgaagtcaagggtagtgtgacttctagcttgaacgactttggtaattgacatgctatcaccacagacagaggacaaaggacaaagagcaagtttttaacaactgtgggtagatggaataagtttcattttagatgtagtcagcttggggtgctagtgggactcaggcgggtctgtgaatggcatttgtgtgagagcctgggctgctgatatgggttaggcatcatgaatatttggatggataagtttgaatgggcattaattgataccaagaagtgattttgagaggccaggaagagagcatgacagaaagtgaagaactggatcctggggaatgcgtttatttaaggcttggatagaggaaatggagttagtgaaaagatggaggagaaataaccagagaaatagaataaccagaggtggaggaggtagagagagctgtcgcaaaaaccaagggagcacagaattttaacaaggcattagtggctaatattaacaaatgctacaacgatgtcaatttggatgaatgctggaatgaggaagccactagatatgatatgtggttgccagtgacttttgtgagaatagttataatggagtgaggaggtcagacccaggctacattgggctgaagcatcaatgggctgatggtacagcaaacaaaatactatgaaaggccttcatgctaaatacaatcaactataatttttaataattttttttgagatagggtcttactctgtcacccaggctggatgacagagtggcaggatcacggctcattgcaacctcagcttcctaggctcaagcaatcctcccaccttagcttcctgagtagccgggaccacagatgcatgccatcatgcctggctaattttttgtgcttttggtaggggttgggtttgccatgttgcccaagctggtctcaaactcctgagctcaggtgatccacccacctcagcctcccaaagtgctgggattacagaattgagccaccatgcctagccttaatttttaataattaattaacatcttacttttgaaaataagagaaatcaccaagaggaagaacaaaaccaaataaaaattgtgcataaatcagggagttaaacacagatcaggaaggagggagctgtgagcaataagcaaactcaaacaggtggacttcttggcaggcaaatataatatcagctctgcaaatgagagattagatcttggaaccttggcaaacgagaggaggtgaaagggtcaagacccagtcagtagggtcccttgaatctgacaggagtaaacatgtcctgcctagaggaaaatatttccagtttaggccctcagaattcccaagattaagttctataaaatataagcctacagtaaaaacattacgaaacatacaaggaaacaaaccactatgcatgggaattagtagaatagaaacaagagatttagatctccaaggacttcaaatattgtaaatattggatatagaatataaggcaactaagtgtgaaatgcctacagatacgaaagatgaaatgaactatgagcaagaaataagaagtcataaaaatgtcaggcagactttaaaaggtagaaaatagacattttagaaataaaatataatagttgaaattaaaacctcagtggatgtgttaaacaatagacaagaggaagatgaagacagaattagtgaactggaagataggtctaaaaaactataaagaatgaagcctgaagagataaagattgagaaatagtaaagagagacaagagacattgagaatcacatgataatgtgtgacatatgtcttatcaggttcacaaaaggagataacaaagaaaatgggagagaggaaatatttgaagaaataatttctgtaattgataaaagttattcttaatcaggaagcaaaacaaatctcatccaggataaataaaaagaaatctattcctaggtatattataatgaaattgcagagccctcaaatgaagataaaatcttgaaagcagctagagaaaaaggacagatcatgaacaaagaagcagctattagattgatggtggactttctaacaacagcaaaagatagaagacaatggaataatatcttcaaagtgccaaaggaaaattaccaccaatttagaattatctatacagtagtgagactacaaaataaaatttcagtttaacaaaaaccaagaatttatcaccagcagactttcactaaggaagcttctaaaggattggacttcaaaaggaaaatgatccaggaaaaaatatctgagatgtaagaaggaatggtgagtgaataaatcagaaaacatgtcggtaaatgtaaataagcattgtctgtttataatgatgaatggtgatgaagttgatggtgacaatgtcaaattcgtgagataacaaaaaggacagaactaaaatgctggatgataagaacacatatattgagaggcagtgattgaaaatgaagtattctaagacccttgtcttattgaagggtggatagatttaagatactgaataatttagactttgttatgctaagtatttctggtaaaattttaagggtagccactaaaagagtaaaaacatattgtgtgtgtgtatatatatatatatatatatatatatatatatatatatatatatatataatatatatatatatatatatatatatatatataatatatatatatatatattttttttttttttttgagatggagtctcctctgtcacccaggctggagtgcagtggtgcgatcttggctcactgcaacctctaactcttggttcaagtgatcctcccacctcagcctcccaagttgcttggattacaggtgtgcaccacaatgcctggcaaattttttgtatttttagtagagaccgagtttcaccatttggccatgctggtcttgaactcttgacctcaagtgatctgcctgtcttggcctcccaaagtgctggggttatagatgtgaaccactgcacctggcctaaattttaaacgaatcgaggagaaatgaaacatattgtgaaatgttagaaaattagaggtctgccagctttgctataatgaatagaaaagaaagatttgcaattaacgtaatgttcgtaattggtgctcctgaaaaagttggttttaaattatttggacagcatgtggtaaaattctcacttttcctactcagtattcattctctctttttctaataacaaaaacacaatctccctcagttcctgacagtgtagtgtacaagaaaaggaggaagcaaagaaaaagtaaattaaaataaatagaaaacacaaagtaagatggcagaaacccagtccacttatatcaacaacagtaaatgtgaacgaattaaactcaccagctattgatagtttgccagattgaatgaaaaagagtgaacagcatgtgaggaagtgacagatagtaacatcattttttaggaaatttggctgtggatgggacaatcaacacagaatagttccatgggtcagaaacagctttgagggagacattattagaattagcaatatttgaatatcaagtacttccaaagtcatgtgatgcataaagagtgaggggaaggctttatttgactgccccaaagggtgagaactgccttccagagcttagtgtataatttctagaatttaaaaatcacttgatagtgagattgagatggaaaaatgggatggttataaaagggtctttgcttttttttttttttttctgaggcaagagtctcactctgtcacccaggctggtgtgcagtggcatgatctcagctcactgcaacctctgcctcctgggctcaagcgattcttgtgcctcagcctctcgagtagctgggattacaggtgcacatcaccacattcagctaatttttgtatttttagtagagagggggattcaccatgttggccaggctggtctcaaacttctaacttcaagtgatccgcccacctcagcctcccaaagtgctgggattacaggtgtgagccactgtgcctggcggtgaaaggatctctctgaaacagagaggacagatctagggagattttgcagaagtacattacctacttaggatgcattaaccacccaatggcattactacatattgttattctgctgtggaggtgaaagtattatgtatcttacagatataataaatgatttgaaggcagcatggtgtagtggaaaaacttctgaatttgtattagaacctcgttctggatcctagctccatgactgtgtggctgtgaagttagacacttctttttttccagctatttggcacttacaattctttgctgagaaacaagagcattagatataatctctacagtacttcctacttttcaccttttctgagagactgggttccctcagaagtctcagggaaatgaggtcatcctgattaaatggggtctattctttcctctaccctaactccatagcttgccctggaaatagaatgaagtgttggatcctaagacaatgtgttggaatatctggcacattagttgtgcaaatgtcaagatcgaatagttttttaagcagcatttactaaaatatatttcagaggacactagtcctttgagacagtctgtcaagtaagtttgggaatgcattccctatttccttttagtgatgtccagtgtacagcagcaagtcagaaactggtgacctggatcaaacagggttataattgattagcacaaatcctcaggaatgaagtgaacattcgtggagtcactcatgagggacctccaaacccacgttgtgggcaaggggagagggaaagttcattctttacttttgcccctaagtgtagccattgctctctagaggtaaggtccttgtgagtattttccagaaattaaaaatcatttggtagtgaggatagggtcaggagatagaatgatggcaaactgtgagatgaataagaacctcacccagcataagactatctggtttactaagggggttgggcaaaatcctctttctcagttgcagtggttattgaattttttggagccaaacttctgctagatgcattttgtgtgtgtgtgtgtgtggctggaaaaataccaaagtttaggttgagtagaaacattgtctgattgaggaggggctggggcaagtgtatcatctcttggccaacttgctcttgtggattcaaggaagtgttatctgaaaagtcttcccctgctgtggcctcatccaaccatcagcacactgccgacagtgtaccactgtaactgcatgccccgataactgctcacattgtgccaagctctgtgctagctcttgtggaagtcaagtgatgagtaagacacagacttgctacaaggacctcagaatccaggaattctaaaaaatccaggaaacagcataagagctttgcctaacatgtaccttagctattagaaggatgaggtgggggcatgtaacataacctgggagtgttgcggaaggtttcttgggggaggtgatgcctgagctgagttttaaaggttgtgtaggcatcagccagatgaagagtgttggtggatgagcaaggagagccttatgggacagctgaggacaacaacattgggggcaaaacagcaagtgggggacaagaagctgttctgtgttgctggaaggaaatgtgtgaggtgcggagaggtgcaaggtaagcctggagaagtaagtaagcaccaggttataaagaatctgatggccatgctaaggaactagggcttctttagcctaagattagtgttttgcaaagtttgatccccatagtctttgcattagcacatccaaaatgcttgttaaaaacaaatcagggtttgcacaatcagagtctttgaaggagggacccagaaatctgcattttaaagaagctcccaggtgattctggtgtaccctgaagttgagaactattgtggaaatagacaagagtcattgaagagttttaagtggtaatgctgctgaatctgtggtttagataactctctctggagttaagtgtagggtagagcagagcaaggcagggagaccacttaggagtctcttgaaataatcctggtgagagtttagtacgatctgaccacagtaggggtagccaggatgcagagacgctgatgtggccacagaagcaagagtacccgagtaagcactgtgatggcagtgtctgagaatcactagctagaggaagcatgtgcacacgatacctactatacgcacaggtgcacaaagggagcaaaggccattatcttcaggtataaaagcaaagatgttcaatgtttgtgcaaaaggccagagacttctctgggcctctgggtaattttttaagatctcaaatttcccacgtgcagaatgggggaaaatcagaatgaacttaacacaattgaaagtggtgggatctgagttttcttcccttgaccccaaacccagtcttcaggactctgccattaatagttaggtgtttaacattcccgatctttttctacacatgtacacacacacacacacacacacacacacacacacacaaaatatatatatatatatgtagcaatagaaatacatagttttattttgcatgctcttgtgtgttcttttacatgcatggaatactgtagataagttgcaactggcttttttttcttttaacaatctgttttggagattcttccatgttagtttttgcaaactggaatcattctttcaagctactttattgttttcctggtagacaggtggcacttttctgtttcactctcgagctttctaaatccaaatgcagaactgcttcccttgcagcaggtgtggactctgggcacctttatccttcactccccacatctctcactgacgccaaagtcagggtttctcttcttgttcctcagcaacttcatctcactgcagtgaaatctcttcctctggcagccagccaagccacatcttggagaggctacctggctgtatctggtgggaacaggaaagcaggctacctgtggccctgaagaaagccttcatagggaaagatgtaggaaccctacctggtacacattgacttgtggagtgccccccaccaggcataggactttccttatatagattatattttgtacattctcaaccaagctgaggattcctatttccatttatttattgttcacccctttttataagttcaagagtctgccaatagaagacactggagaaacactggaagaaaagaaattacttgataaagaatttcatgattcgaaaaacatttgtaatttcaacacttgtaagagatgtgaaggttatagcagatttgtcccaaccacatctcttcatgcagacattggcacaggttactcataacaaggccagccaaggagatgttattggctgaaaataattggatggtctaagtgaaccatggagcgagggtcgctgagacattgccggcttctccacccacatgctaatggaagagttgtgtggagtttatttaattgaagcagtcagagtgaaaactactgaaaacctgctgcttctatttattctctgggtttctatggagagatgagttccaagtaatgatacttttaaagagaaatatatgaggcaaacagtgccctagtggtcagggacgggcatgagcttggttgaagtaggtgactgtattggaggggtgatttggggggtgctgtatggttattggaaggggaaaaatgggacttatgtcccctcaagttttattaatagtaattgatatggtttggctgtgtccccacccaaatctcatcctgaattgtagctcctataattcccatgtgttgtgggaggggcccagtgggaggtaattgaatcatcggtctttcctgtactgttctcatgatagtgaataagtctcacgagatccaatgattttataaagaggagttcccccggccacgctcttgcctgccgtgatgtaagatgtgactttgctcctcatttgccttccaccatgattgtgaggcctcccagccatgtggaactgtgagtcaattaaatctctttcctttataaattacccagtcttagtatgtctttattagcagcgtgagaccagaccaatacagtaatgataatggtaaaatagtaatagttcacacacatctttttcgagcacctactgtgttctactcactgtctcatttaatctgcaggcatctatgagctgggtagagcagaatggttatccttattttaccattgaggttcagagaggttaaatgaattgcctgaggtcacgcagctgataagggacagtgcctacatttgaatataggtcatgtgatcctacaatttttgcttttcacatctaaattgtatggccacagatattgatatccaaattgagggaggagaaagtgcagaagggcaacaaattggcaagagaggaatcagatttaattgattacaagattatcagccattgttttagactctaagacactgatggatacgtgtgccagagtctcacgatcgaagagttctttctaggggcttgccgtatcacattctctccccgcatttgatatcgtgaccaccctggaagataattgatgtgttgttctcaggggccgtggctcaggattcttcagagttgtgcactctttctgaaaggtcaggaggacaccagaaccaacagcatcttgaaagggagtatttgcccttcctggatcagagggaggccctctgtcatgtggtctgagacagcgcagccagggcaagacttaactgtgcaggagtggagacaaggtcctacctggaaggctcaagtctgaagacggaagacacccagagtaatgaggtcacaaggctttgtgatttgcagcaggctgggatgtggggtagtggaacgggcagtttggaagttagatagtggatgtgaagcatctgcctttggtagtactggctgccgggcatggaggctgggattgcagtcttacagggctgagcaggtgggacagggcccagcacattccttaaacatggcattaattatggctgctatttgcatggtgcttttcaatttacaaaattcttccactttagcatgcaatatatttgctgcattaaatggaataaaaggggatgtctgttacaacttatttcttggaagttcacacatatccatgcatattatgataattttgaaagaagtcaccaagtctgatgaggtttggcatatgcctcaacttcagcttttgggttagtttattactttgaaatgaagtggcagcaggcatattcctgtgagtattctgggagaagtctatggtccagagaatcatggaggaatatacaaaggtgtctcaccctcttggtgagagatagtgagcatgttaggctgagaataacctttgaagtaaaagggggccatgaacgttctggcataatcaacagagggacaatctctgttactggtggctcctctcatccctctatctccacctggttctttcttttgtgatgcactgaagtgaagttccttgttttggggcaacccaggcccattcctccttcttttggtgacagcacctagaatttcctttgggctactccttcctcatgcttaaggccacaggtgttagatcaagatggctccattgctggctttgggggtggatcctatggccacacctggcatgtcagaccactgaatttctcgagccacagtgattggttcaggggtgggcaggtgaccagaattcagtggatgctacaggaaagagagatagtctctttccactgcctgggatcttgacagctcgaggctgggaggctctattcagcagtagccaccctgttgccacgaggggagaccttgcctgagcattgagccaatgggtgtagcagaacctagagaagaaaccagttcttgatgtcatcagttggggctctgcatcaaacttatgtcagattctcagcaggaaacagatggaatacttaaaagggcataactgaagaaaggctaatgccaggggtatttgcagaggtgtggaggaggattaggggaatgagaaagcacagtgaatcactcagggactagcaacagtgggaagctgttagtacccgtagtcctgaaggcgtgaggggagggaacagtgttaccagagcctgataggagctgagccatggaaggggggatggtggtggcagaggaatgcagccattggcagactgtgatgaggcagggaggaagtgggaatgggctgggggagacaaatgctctgacgataccctcctggagccttctcatcttctgctggccctgcatcgattggacacaatcaaagccagagattaaggtcagccttccagacacagaacacagcagagaagggcagagaatggatctgggttcggggaggtaagtggaaaaaaccagcacaaagctaatgtctgttagatttgtcagttaggaaaaccaataatccttctttttgcataagccagttttgggtgcctgttctatcatttgtactgtaagagtcctaggtgatttataaaccttatcaactagctcttattgtagttattggttatgtctcatcttccctcctatatgtgagctctttgaggatcaggactgacttttatgtttctgtattttcagtacagtgtccagcgcatagtaggtgctcaataaatgcttgctaaagtgcattgagctgacttgggaatggctcacacaaagacaaaaggcatgttctaccatggcacttagctgcaaggtggggagctgcatatgtacatcctgagctgctttgccactgctgtgaaagcagagaagggttgagtccctggaaaaggaatttgggtaagtgcatgggaggatgggaggaagcagagagatgcccgtgagtgttccaggctgtggactttgatgggcagccaagatgagacttttcaggggcaatgagacatttgttcagcaaacaaacctggggcagaacctcaatgttaaaagctctgttagaaatcatctgatagaattcccaacatgtgacatcatagtgtggggttgaggtgggagggcaggacggatgactgtaaagcaccaacataaagctggtgatccagtataacatgctaatacctcaggggaaagataaattgcaagacagggtgaaaaaattcagggaagggctctgattggcctggctgagtccagtgcctatcccttctaccaatcacaggccagagggtctcttgcttcttcctgtaccagttactagaagaggtggcggaaaggttgctgggaagacagaaactatgtgttttgatatttctaaccattcctgttagtctggagccagtatctgaatcttgtttttcacagatggcattgcaaagacagcatacctgagggatagttgagggttctcaggggccataaaatgctacaggcaagaaagatgtgggctttcttaaacgattgtctgaaaaaacagagggaacacagggaatgcacagaatgcattctgggctttctagctattatgccttaaggcagtggttctcaaagcatgttctggggagccctgggagattctgagatttctttcagagggtcctcaaggtcaaaactattttcataataatatttgcttatgttatttgcttatgttactgtcattgactcaccggtgtacggtggaggagaatgaaatgttccaggggatgcctggcatgtgacgatgctacagattgaatgcagaagcaggcacgagaacccaagtcttcttcgaagctagtcatcaaagaagtctgcaagaatggaaaacagtgccactcttctcactattttttttggaaaatagttattttatgtaaaaatagatatttatgttaatatgcaatgagtttattagttactttaaagatgaattagtgtgtacacttgtagagatttctcaattttaatttctgatatggcaagtattgacagatgttacctacataaacaagagctctttggggtcctcactcatttttaagaccgtgaagtcatcccgggattaaacgtttgagaatcactcactgccttagggtaatgttaagtccctggcaatgaacgggggaagggaatttaccttttttctgcttgcatcttcgttttaatactgaagttatattgaatgaatgatagtacttctcatcctgtggagatagccccatggagacaggagaatgtgcagcgaatagtggaaagatcatgcatgaaatttagtcagacagtcctgtctttaacttaaagttcctctgggcaagtgattgtgatcaaattacttgctatttctgaactgcaatttctcattggtaaaatgtagatggtaacagctacccaactcactgaaattttgtggagattaaatgatgtgtttgcgaaaccatcaaacctgttgccaggtacgtaacaggtgctccataaatattagcctcccttcctccctctcagggtgctccaagcgcagtccttttagagtcaccaataggaattcttgtctgaagtggttcacaaacatagttcaacctggtctctggcctatttatttatttatttatttattatttattttgagatggagtctctctctgtcgcccaggctggagtgcagtggctgcgatctcggctcactgcaggctccgcctcccaggttcacgccattctcctgcctcagcctcctgagtagctgggactacaggcacctgccaccacgcccggctaatttttgtatttttagtagagacaggatttcaccgtgtttgccaggatggtctcgatctcctgacctcgtgatctgcccgcctcagcctcccaaagtgctgggattacaggcgtgagccaccatgcctggcccaagtctctggccttttcttgtcccatacgtcttttgttcctaaagaatcagttctctggctcatggatccccttttttgcaacatcagagccactgaattccatttcctgggtttacttactcttggtggatataatgaaagcacaggggaattttgtagatagatataccatcagtggatttttttttttttttttttttttttacaaacacactcttcttttcttttgggatcagaaatggtttgaaggggagaggaaaaggccccagtcagagagttacctagcaactgttggaactcaggtgaaatctgctaattagattgatgtggagtgtggtccgagaggagttgcctagcaaccagcagtctcctggacctcactgcagattttggtggacagcatccatactcccttgagaagggcttccccaaagttgctttccacatggaaatttccacccaaatttatccaacctgctctttctctctctctttttctcctctgcccctctttgccctttttctttggatcaatcaataaaccaggcagctaaaagaaagttgaactttttggggacaccactaggtctagtggaaagaccatgagttctggagtcaaataaatctgggtttcaaacccgttctgtcacttattggctctatcagataagttacctcatctaagagtcagtttgttcatctatgaaatgggagataatagagccaaggtcagaaggctattgtgaggtttaaattagataagacccagagtgcctgacatatagcaatactcattaaacattacttccttctatccactctctttgcatattaggtattacagactgtaaggaatcaatcagaaggattagtatattagaaatggatgcctaaaacataaatgttacagaggaatatactgtagttgttagtatataatatcatattttatataaatatatataaaccacttttactagttcttcaaaactagacatttagacaatggaaaaagagaatgaaatatgtttgaatattggtgaagttttgttttcatcttgcccatagaagatgctgtcagatcgtgagtgtttttacatcagaaacataaggatgctgtggtagaccaaacagtggctcctcaaagatgttcacgtcccaatttccagaacctgtgaacatgttgctttacatggcagagggattttgcagccttgattaaattaagggtcatgagatgagattattctgggtccttattatagggtccttctaaggaaaaaaaggggacaggagaggcaggaggagatgtcagaagcatgagatccaagaagagggagatttgaagatgttacactgtgggttctgaagaagaaaggggtcacaagttaaggaacacaggtggcctctggaagctgggatggcaagggagccaatcactcttagagcctccagaatgaacacagcccggccaacaccttgatgtgttagcccagtgagatccattttggacttctgatctctagaactataagataataaatgcatgttgtttttaagttactaaatttgtgacaatccaggagtttgagaccagcttgcccaacatggtgaaaccccatttctactaaaaatacaaaaatcagccaggtgaggtggcacgtgcctgtaatcccagctgcttgggaggctgaggcaggagaatcacttgaacctggaaggcagagattgcagtgaggtgagattgcgtcactgcactccagcctgggcaacggagcaagactcaaacaaaaacaaaaacaaaacaaaacaaaacaaaaaaccctccaaaaatagtgacaatctctcacagcagcaacaggaaacgaatacagatgactttgagtgttttggtgggggctcagacgtctggaaacttgaccccactgtgctcctattatgcccttgactagttgaggcaatgtttttccacctgttcactgaagggattggattaaactggcatctctgttgggccccttccagtatagccctcgtatgttctatgctccaggaccgcccagtggagacagttggagtgagtaatgaaacagtgttgctaggttctttggagggcttgtgttcattcaacaaactggtacttaataggaaccaggtgctgtgctaatcgctgggaatataaagacaaataagctgcttttgcccttgcagaaatcagagtccagtgggagagggagtgagagggggtaacgcactagtgccaggccagggtttccagggtggtgggggcaggactaaggctcctgactggtgtgaaggtgaaactccccagaagtaaagaatagacaatgtttagcaggaagggagatgagtgaaggtgatttcccaggcagagcccgcgcaaaggcagggaggcacaggatgtggggtgtctgggttacagcaaagaggaaatcaggctgattgagtgggggcgggagtagtgagtgcaggctgggagccagaacctgggggggccttatcagccactctgagggcagtggggagcccctgaaaggttctccttggggcatggcaagatgccttcatgtgctgtgattatttttcactttgatatttaaaagctagagaggctttgggatatagagccttgccagcaaattacttactattatactggcgatattaaataatgcaaagacctagagaaaaatttgtcagagtattaactctggagttaaactacctggccttaaatcttggttctatcactggctagctgtacgaccttgggcaaactgctcagcccctttaggtgcctcagtttcctcatctataaaatgaggatgattgtagaattacctcagagaattaaatgaatataataaagtgcttagagcactgcctagaacacagtaaatgttctgtaagtctttgctgttataatttctgataagaccacaaacattaggatttttttctgacatgagcctcagtagcacactgtttggtgtgacggaggtggttctcttagactatgtccaagggggcttgttactgcatgtggccaggtcaccaaggtgaaccttgttaaaactccaattctcgttcaactctggcagcaaagactccaaggagaccattaaggtgacactctggggtatttcaggaatgttctctgtatcttgatgtcccagctgaataggcctggcaggttgcccatagcaaaacttgcacggaggccgaacttcatctttgatttcctctgctctcccttgacaggttctgccaggctgtttgaccttaggcaagtcactctgccttttggaggcttagctttcttgcccatgaacaggggccaatgataataccagtctttatctaactcaaggaagtgttcactcactatattagtggcctatggttgcgttattacaccaaaatgtagtggcttaaaacaacaaacattttattatctctcagttctgttggtcaggaatctgggcacagcttagctgggtacttctggctttgggtctctcatgagattgtaatcaagccgtgggccaagactgcagtcatcttaaggctcaacttcaagttcactcgcatacccttggttcctgtctgctggggctgtaacaaaataccacagactgggtggcttacaccacaggaattgattttctcacagttctggagcctggaagtccaagattaaggggctggctgggttggtctctcctgaggcctctatccttggcttgcagatggccgccttcttgctgtgtcctcacgtggccttttctctgtgcctgtgcatccctgggatctcttcccattcttataaggacaccagttctactggattagaccccaccctcatgttctcagttaaccttaattacctctttgaaggccctatctccaaatgtagtcacactggggcctagggcttcaatgtatgaattttgggggaacacaactcgggccatagtagtttttcaccacacaggcctctctatgaactgcctgagtgttctcatgacagaggagctggtgatccatgggagaatctgaaagcactcccaaaagtccttgtataaccgaatcttggaaatgacctttatcacgttggcttccatcacttctgctgtattctatttgtaagaacagagtcactcagttcagcttgtactcaaggaggggaaataccataaggggatgggttccataaggagagatcattgggggccatcctagaggttgcctatcacagccattcattcacacaatgcaaatttactgagtgcctactatgtacccctggtgatacaacagcaagtaaggcagacacaattctgtatctcccagagcttgcattctggtaggggagataggctacatacatactgacagagcaggagcaccgtcatctcagataaacactgccactttaagttccagctccctttctagcctcatgcatttcaaggaaatcacttctcttctaacaacaagcaaccagaaagagcagacagtaaaacacagataagacagctcgggcacagagggaggtggggagaaagtctcttgggtaactgccaaacttcaccctcatacaatggacccgagtaaaacagtgggccttaataagcacattcctttcccttcaggatgccctaagatagagaagctaaaagcagactcaggggtatgctgcagctgcagaaagatgtatgagaacagacacaactctccttcccagagaagcacaacaaagagacacagaagcagtccaagcctctgacaaactctcccaccctgaatccttagaatctcttagtctgtaagagagtgtgctctgacctaactcggccagaagccactctcaggtttgctttctctaaaatatacctctccttgactgttgagccacctttcatgtttctttcctttttatttaattcttaacacgtactgggtgctagatttatctagataaataaaaaaagatataaatatagatctgtgtgtatttaggttcaggtagtgatcagtgctctggacggatacagagcaggatggaggatggcgtaatggagagaaagttgtgtctattcaaacagccactgacagcttctctgatggggccacagaaccctgcagtaagggaggggagggcagatacctggagggaagaagagcttgtgctgctttgttgttagaacaaatcaaaatcacatgcttgaaaatgccttgtatatggacaagtgttatgcaactgtaaggtggtgttgttattgttgacagttttcgttgcccgcccatcccatacacccttatccagcctgcctcatcaagggattagctgatcaatgcttagaaggttatttgtccagagtaattgtgtttttttcccccaagtagagggaatatctttgttgattcttctgattatatagtgatacatgctcattgtaagcaaaattcaaacaatacaggcaattaaaatttcaaaggagatgcttgcaactgagaaagatctgactaaacaagagaattaaaatgtatcacaagccatgtcctgggggctgctttgggtgaaatatctcaggtgcctgtcatcctcttggttatcccagtgggggaggtggtgcagggactggcccaggccacagtgctggaattcagacccggtggactccacccaagtacctgctgctttctctacatcgtgctgccctccatggatggatattcacagataagggcatgggcgaaatgttttcagcttgcagataagcaagggacttgtcagtgcccctcagcattgatcttctgccttcagctggtccctgcattttgggaaaggagattggaggaaatggcaataggacatttaggttttacacctgttttctggctcagatggcctagtgggtatcatccctgttaagatgttttctgttactgttcatagaaaaagacagaagtaaagtctcctagtgaggttggggtgctcacactacttgataagtgatctcatcattaaagtacaagaccttctaatagggaacgagagcttaactttaccaaatcacctggagtataagccacagactcctttcttttgaaataataatgactattagttattgaccctatactgtgtaccaggccccattctaaacactttaaaataattaattaaatcacaaaaacttagaagtaaaatttcaaccttatagggtagatgtacatttaacttattaagaaactgccaaacagttctccaaagttggttacaaccattttacattcttaccaataagtacgagagttctggttactcaacatcctcttcaatggtgtctatcttttccattacatgatgtctttttcattttatcaatttaagcaggtatgtagtggtattttatcatggtttaaatttctctgaagattaatgatgttgaatattttctcatgtgctcattatttacgtaatttgttttaaaatctttctgatagttattaataaataatttaagactgaattttcctctaagtatgggtttagccatatcccaaagagtttgaaaagaagtgatctaattttttttagccctaaataattttatctttcttgttttttttctttttagagaccaaggtcttgctcttttacttaggctggagtgcagtagtgtgattatagctcactgcagccttgaacttctaggcttaagctatccttacacctcaatctaccgagcacttgggactacaggcatgcaccactacatctggctaattttttaatttttatttttttagagatgggatcttactttgttgcccaggctgatctaaaactcctgagcccaagtgatcctcctaccttatcctcccaagtagctgggattacaggcttgagccactgtacccggcaattttgtcattttatttctaataattaaaaaaattcccgagttatttaaaggataattttcaggtttccccaatgattaaaattttttgtttgcttatctgttaattattagcttctgaatttgcataattatagtcaattagcatgacctgtaaaatactaactttttagaaaataacatatgtggttaagtacatggtccctatttttaagtcttctatgggaataaagaatatattttatgggacctggcatggtggctcatgcctgtaatcccagcactttgggaggccgaggcaggggataacaaggtcaggagatcgagaccatcctggctaacatggtgaaaccccgtctctactaaaaatacaaaaaaattagctgggcgtggtgtggtggcaggcgcctgtagtcccagttactctggaggctgaggcagaagaatggcatgaacctgggaggcagagcttgcagtgagccaagatcgtgccactgcactccagcctgggcaacagagcaagactatctcaaaaaaaagaaaaaaaagaatatattttcctttttagtgtacatggttctctttctacatatctattaaatcaggattgataattatgttgccaaaatgatgtctatacttcttttgtctgtttaatctacaaaatttgaagagtgatgttttggattctcactgtgcttttttttttttttttttaaattgaatttgccttgcatttctaagagcctttgccttgtagattgttcactgcatacatttcatgactatagctacttcttcatggagtgcccttttatcattaagaatatcctttctttaaactgtttaaatttttggcctaacattctattcttagcccttaatatctctatccatgtttctttttgtttgcttttgtctgatacatgtttgcttatccaattgttttcaccttccctgtatcattttgttttaggtccatctcttataaattgcatataattggatttttgtttttccaacccatccccaaggacctttatcatttcacagtggaatttaaccctctcacatgaatttggcatccaggaggtttggtctcactcctgccatttaattttatgctttctgtttattacactttctattggttccctcatttctgctttacttatttttgttaggttgataaagtttattcctttttcttcctctccagtgaattagaagttctaatatgaattcatattctactgtgtttacatttaatatacatagttaaatatatctctccaacaattacacaagtgaaatagtgatcttgtccctccagttttgccagaataatttggaattttaattgcatgttaacttttttcttagagcatgcctcttatagtttaagaatccatttaaacttccattgcaatttcatgtcccacttctatcatttagatttaattattaataaatgtttattcgattgaattatatgtgggcatttttggtctctttgtttatctgtttgaggacagggaccattaaaaaaaagttgtctatattctcccatagccttacacatggtaagcaattcactactatgatgttgaggacacaattttgaccctcaagtttgacctatttttgccccaactttgccccttgttagtcacctgagcttaactaacattactgaccatcggcttccttaactctgagatgggtattataacgttttggtgccacaaaagaaatagcacttgaatgtaaaattttctttttaattctcagcaaggcaacgtatttctatagaaaggtgagtccttacagatggagcaacggtgagcacacacctggacaagggagggaaagggctgtggccactgctgctgtgttgttcccctattggctaggattagactgcacaggctaaattaattctgattggctaatttaaagagcgtgacagggcgagtggtttggtgggaaaacgtggttatgcagtgaggaggatgagtcagggcagaacaggtggcagataattggaatgtcagggtggagcagtaatcggaatgagtcagggtggagcaggtgattgaaatgagggtggagcaggtaatacaaaaaggttgctttatgatgaagtttaaaagtagaaggcaaagaattgaatatactgacatattgattctttgaaaagaaatttagaactcatatctaatggcataacttggcaggctagttaatgaagttaagatcaaatctgcaagaattctgagaatcagcttgtgcagctgaaactgctgttgcaaaataatgactgagacagtgaaagagatctaacttaactgactccatcttgcgtctaacctttaagctgcggtgttccttcttgggtgtaggctgaactaacttagggaggaacttagtttctagtttaaaacaaagacgatggcagccctttcccaaaacaaacctccttcttgcctgggcaccagactgcctttgtaagactaataaattacataagattataaattatggtttaggaatcatgtggctggaggctacaagattctgagcctccctaaactgttactaagatcactgcttgagatattttgcagaccctgcacttgatggatcagctgacaccacccagattgataaactggttcatctgatcttgtggccgccacccaggaactgactcagcacaagaggacagcttcagcttcctaaaatttcatctccaacctaaccaatcagcactcctggctcactggcttacccccacccaccaagttgtccttaaaaactctgatcctttgagtaataataaaactccggtctcccacacagcaggctctgcagtgaattactctttctctattgtaattcccctgtcttgatatatcagctgtgtctaggcagcgggcaaggtgaacccattgggcagttacgcagctgctggatgaacaaataaatgtgtggaaaatgaagaaaaaccgagagtcaaagcttacagactctgcgatgtgtcctggatgcaaaggccacctcctggagtttttgctacctttgcttttcagctgaaagtattttgggtgagctcagccaagaggtggctgcagattgtaggtggagatgctggggagtgtgtggggttttgcgattttccaagctctagatgtacagccaggggagcccctatgcaagactcagcctactcaccacgtggggcgctgtgcagtcatgatatttaccagcagtcaatccggtagggagcctcagaatggtgagttggacttggcaagggcatgcttggctttcagggagtttgtttgcacagtcagattgatttctgctctcctgtgaccagaggacaccggtgcttatcttggtcccctctccaccctttgtttgcctgaccccttggctccctttttaatactttaaaattttaaggttttcctttactaaatatcacagaattttttttattttttcttctttttttaaatctgggagcttaccacccaagctggcccagcctgatgtttttttttgctttgtattttcacaaggatgagataagtccccatgatctctcctgggttttttgctggtgctgcttgttaactcgagtaactctcggcattttctttgcttcctttctctggcatttctgccaaagtgtttctgaacgttcaaggcctgagtgaggttgagctagattgtctcttagatgtgcctcatccaaggcttcccttcacacccatgctgggcttagtaccaaggggtggtccatcctttgccctatctgagatctcttccccactttaattaactttttagtttgaattttcaggaaagttgtaaagatagtgcagaattcccaaatgtccttcatccagcttgctttgctgttcaccttttttggtacaatactattaattacagacttcagaattcaccagcttttccacgaatgtctttttttctgttccaggaaccaatctgggatcccatgttgtgtgtagttgtcagaggtccttagcttcctcccatctgtgacagtgtctcagtgttttattgcttgtgatgatcttgaaaattttgaagagtgccccattttaatatatgggaacacaagctttactgcatttggaaaggaggaagagcaatgtattaattcctttctgccttctcagagaaagtctgctcttgtctaagccattgttctggtagcagcatcaacactctcagaagcgtttttgtttttcttttttttttttgagacagtctcgctctgttgcccaggctggagtgcagtggcacgatcttagctcactgcaagctccgcctcctgggttcacaccattctcctgcctcagcctcccgagtagctgggactacaggcgtgcaccaccactcctggctaatttttttctttttttttttgtatttttagcagagttggggttttgccatgttggcctggctggtcttgaactcctgacctcagttgatccacctgccttggcctcccacagtactgggattacaggtatgagccaccgtgcctggcctcagaagctttttataaagcgtttggagcaatgaattttcttccccatccagaagtttgactaggtgatatgtaatttttttttaaatgttttatttccataggttattgggggaacgggtggtgtttggttacatgagtaagttctttaggggtgattcgtgagattttgatgcacccatcacctgggcagtatacactgcaccctattttgtagacttttatctgcgtgaccctgacttagtatataaacaaggaatgcatggagtcgacaggttaatgatgcccctgggtaatgtcatatatggttgtgcccacattccttataggtacatagctgagctagaatttgcaaaaactagcatttattaatttttttggcaggggccacccctttagcacctgggagcacatattccgccccacccgccactcccctgctcgcctctgtggggatgcaaattctaaattagagcactagcaatggcagtccagatgtcacaactcaaaacaccaagaacagacagagccatctttatctaagtgtgacacctggatgtgtctcagccgaaagaacccccagactcccccacatcagaatactgggaagtctggttacagtgaatgatgaggaccccttcagggatgggaggatacagcaaaggatcacaggagcctgggagggagatggagaaggggaaaggcacgagcaacaactcttctccctattcagagccaatgtgtgtggacaggtgtctcgaggttggctgaactacccctttctctggttctctgcttcccctaaaggcatctctggctggctgctcaggaaagggaggctctagagtagatgactgacctgattttccagaccccagaaagatctctgggactgcacggtggcctgacttggtgtttggaatgggtggcaacgcttctggatagggggagatcattagtattttagtggaagaggtgctgatgggctgcagaatcctttgtttgtcctggctctaccaccaacatgtggtgcggctctggtaacccaccatttttaatttccttgtctgtaaaaaaaagggaaggggggaggctagatgagataattccaagattccttcaaactctagcacattaggattcttgtttagctctgtcacacccaaggtaacttgactcaccccctattagaggactcactcttttcctcgtgtgccgtgatgtgaaaactcttggaagcctcgtggtgccggcaagcatgccttggggccctctggcatccatgtctcattcctaacagcgccttggtatcctttgggataattaccttttgtccagtgtctttagtctggaagatctctgacttccaataaacatgaaggggacatgtgacccaaaccctgccaaagagatgcttttttccctagaatttgaaccttgagcaaatgcgagaaggttgcaaacgtcatccattggtgatgcctggacctgccactcctgcggtaggaccatttctgttcttcctgtctccaggaactgtctgtgccccctagcagcatccaggcctgggtcccagccttccagtggattcccagagcctctccttccctggtatccctttttgcttaagttaggcaaaatcactttctgttgtttgcaaccccattgtggcaagaaatgtgctctgtgtttcagaaatttctggaagtgctgggaaatgcaggccatgccacccagtgacattcaggctctggagtgaagagacctaagccaaattggatgtgacatctagtggctcctttgcttattggtgtccttggataggtctcccaaactccctaagcctgttttcttttctataaaatggagataatattgagccacacagaatggccatagagaatgaagaaacatacacacagtcagttctcaatcatcattggctttgattgtgattacaataatgaaagcttggataatagtgctgtgttggatctcatctgtctctggggtccccaaataaggagcagagactgaggataataataatgatgatgacaacaaaaacatggcactcttgtatagtagtaagtatatcccgggtactgtcctaagtgctttatgtattaactcactcaatcctcacaacctccttatgtggtaatgtactcttactacctctgcttaacaaatagggcattgaggcatagagtagctaacttgttcaaggcctccagaagttattggtctgctctgatgttttctatctgacagagagaaggctgagcagacaggccaacatcacacacacactgcagaattcatgtgcttatgtgctttctctgcatgcctttcctggtcttggggagggcctcattgctgcagtggggaagggagatgcttcatcagtaggcatgactcatagccgagcctgtgctcctggatttgttctgaagtgagattctattgtgtttattgcaaacagacaggcagctccgtttcctgttggttctgtttccttcctattaaattactgaactgtgaggactggggagggcgggtaggaagggagatgaagcagggttaagaggattctgttttcagcaagtagtgaattccccagaagcttttcccacttagtccggatgcatccatacgatgtgaagttgggcttaattgcttcgtgttggtggcagagctctgaagatgaggactggctttcctactggagagctggcccgtggaccaggcatctattgctgaggccagatgaaaatgggccagggcctctggccacacgctgccacagccaagagagatggagcaaagccatgcagtgtcaacttaggtttgagaaaggggtcaggtcaaagtgctggaaggactccccatcactgagttccttgccatcaacacaactgcagagcagagcagaagtgaccacacatccagaggccactgtggaggaaacacagcatcaggccctttcaacacttagttaatcctcatgttggccccatggaattattttattttcctactttatacacaggaagtcgaagcttggagagattctgtgaattggtgaaggacacagagcaaagccaggattcagattcagacctgcttgactccaagatcattccagaaatctcccttttcctttggaccctgtgacgtgacagctgggttctttctgctctgatttccatgcctgacaaccatttaaatggaatacaagaatgcaggtaactgaagaaacccatggagagaggtgaatgcctttgttttgggtgtggttgttaaagaggaggtggtggttgatatgagggggcatttgtctcaagcaaaggaagcctgtactgaaggcagagtgcctgggctggagaagtccaagcaggttggaagccctaaagaatcagctaggttagttgttctcaactgcgggggatttggtaatgtctggaaatatttttggttgtcatggtgggcgtgggtgtgtgctactagcctctggtgggtcgaggccagactctaaatatgcatagaatagcttcctacaatatggaatcatctaacctgaaagtcaatggtgctgagattgagaacgtctgatcttggaaatcccttatttgcagatatggaaacagggttcctaagagttggatgcccacccctaagtcacacagctcaagtgaggcagagatgacaccagagtggaggtttgcagcaccccaggtgtcttagtctgttttctgttgcttacaacagaatacctgaagctgagtaacttgtaaagaaaaggaatttatttattacagttatggaggctgataagtgtaaggtcaagggctacatctggtgagggccttcttgctggtggtgactttctgtggagtcctgaggtaacacaaggcattatatggtgagggggatgagcgtgctaactcagctctctcttcctcttcttataaagccaccagtcccactcccatgttaactatgactccaggaattcactcatccattcatgagagcagagccctcaggacccaagcacctcttaaaagccccatctctcaatactgccaccctggggattaagtttcaacttatgttttagaggggacaaagattcaaaccatcgcaccagctgagtgatatttaccccatgcagagtggcctcagtcaagtaatgcaggaatgggttttctgatagacgggcgttggtccagggcagctcagctcaagttgcccaggctgggaaagggccagacctctctccttgatgaagaggtggttctggtctgctgatgtgtgcatggggcccagggcccagaggaggaaggggcactgtggggactccttggagccagcatgagctgtgagctgagagacacaggcaggaggtctcggccactcttctctcctaaccctgagcttctacttctgctgctgggcctgccatggccttcctgcccatccagtgggaagcataggaacaatagctcctgactcctgaataacacttgatagcactgttttatagtctgtctcttcattgactgtgtgagcttctctacaacttgatgaggttagttaggtgggcagtggggatgtggctattcccattttaaagaccatggaatgaggctgaggaggttaaccacctgaccacacgttgcaccagaggcccaggtgaaccagcagccctgccctctgatccacgtctggcattctttcatctactcttccaaatgagagtgagagctcttttggtttgagtactgtgctaggtgttgcctcttttgaatcacttctctgtattcctgccatgtgccatgtttcttaagggtgtgaatatctcagtttttactttccaactaacatatgtgttctgtgtttaattttcgcttagataactgaacctgccactgtgaggcatgatgccatagcagggatatggtgtggactggggcatagtacttcgtctctccatgctcagtatagtaggaatgggagatagaaaagacaatgattgaagagtaaacatagggtgccattgacataccccattcaggtctcagagagcttctgaacctgtgtaaaccactgacctcactttactgctttataatttgcattgtgtaactctgtctccaggagacctcaggcttctttagagcagagggcatttcttttcgcttttgtctctcccgcccttagaaggtgcttggcacattcttggctctttcctggatctgtcacattctctttgctaagcaccaagaggcaatttgtgctgatagaggcaatctctatcagtaggatagctgaccccatcttcatcagtaggatagctgcctccaagtaggtctctactggaaactctctgacagaggtgggggctgtcccactccccagaaccttgagtgtcagaggcagaatcccaaaggcctggtcatgccaccttgggacagtctggggtgggcctctctctgggagccagctcacagttcccatgctgtctccagcaactgttctttgacacacatatgaggacaacatttctcctatctgttggaacacagtcaacatttagtgtctgagtccccgtttccctctgcatttctagctacctgtttgaatgttgttaggtaggcagccagccacagggaccgaggcatttgaagctccaaggcagttgctgacttctgaagcagggagtgggagactgactatcagttcccgctcctctgcttcagggccctgccagtattgtaataacatctccagaacatgtctaactacacgttacaattatcctctccaggtcctgcattgcatttccttagaatctcccccgagcctgatagcatgcagcttctaccagggagtccattgtacccctaatttctttctttgctgcgtcagccagtctccttgggcttctgcctcagcaggtgggctgggtgaggattttccatcagtccaagcatatctttcaacaaagacttcaactttaaagaaatcctgtgtctctaggtgctgattcttctgagcaattttcagaggcctcctttgcctgctttcacccaagggaaatttctggccctcagaccacgcgtacttggctctctgacagtgtacctgcacccaccaccctcatggtgaggttcatctcaaatgagttttagaacttccttctgactcttgggagatcttcctaaggggattttccaaactgtaaggagaaaagggaggtgggtaaacagtgagtctgagcatgggagagggatgcatgataccgttgaagatagggacatgccatagggacatccctcccaatccccccacgatataagctaactatggggctcctggaattggttgactaagctgaggcttctgggcactgaaataacattatttaatgacagtgttaggaagaagctcttctgaaggcagtgaaacaggatggatgtctcgacaggaagagttagaaattcaccctttatttattattttcttccttttattttttaaaaatcagttttcttaggttgaaagaaattcaccctttatcaagaattatttatagttcctctggagtgagagaggaagacattacccacgcagtgctctgtggaatcatctgagccaccacttctgccttggggacatcatctggggaagtatctagatcctttggctgaacaacgtgttttgaggtctttaatatgtcaccttaaggatgaggcctagagaacatggccttttgttgaacagtttgtaagctctcaaatgtgagtaaatgtgaggagggtcttgagagatataggaagctcaagaaacctagctagagtctctagactgttgagaaaagtggtgagaagaaattcccattgtgggggatgggagtggtggttcaggaggatttttgagaatggggatagagagcctagaaataaggccacacacccatggccatctgatcttcgacaaagcaagcaatgagtaatggactccttgttcaataaatggtgccgggttgactgattagccatatgcagaagattgaaactggactccttcctcacaccatatacagaaatcaactcaagatggattaaagacttaaatgtaaaacccagaactataaaaactctggaagacaacctaggcaataccaccctggatataggaacgggcaaagatttcatgatgaagacactaaaagcaattgcagcaaaagcaaaaattgacaaatgtgatctgattaaacctaagagcttctgcacagcaaaagaaattatcaacagagtaaacagagtaaacaacctatagaataggagaaaatatttgcagactaagtatccaacaaaggtctcatatccagcatctataaggaacttaaacaaatttataagaaataactaacaattccaacaaaaagtgggcaaagtatatgaacagacactttgctaaagtagacatatatgtggccaacaagcaaatgaaaaaaagctcaatatcatgatcattagagaaatgcaaatcaaagccacaataagatatatcatctcacaccagtcagaatggctattattaaaaagtcaaaaaataaccgatggctggtaaagttgcagagaaaaggaaatacttatacactgttagttggagtttaaattagttcaaccattatggaaagcagtgtggtgattcctcaaagagctaaaaacaggactaccatttgacccagcaaacctattactgggtatatgcccagaggaatagaaatcattctaccataaaaacatgtgcaacaaatgttcattgtagcactatccaaaatagcaaagacatggaatcaacctaaatgtccatcaatgacagattggataaaaaatgtagtacataggtcccatggaatactatgcaaccataagaaagaacaagatcatgtcttttgcaggaacatgatggagctggaggccattatccttagcaaactaatgcagaaacagaaaactaaatagtgcatgctcttactcataagagggagctaaatgaggagacatcatgaatacaaagaggggaacaacagacactgggacctctttgagggtggagggtaggaggagggagaggagcagaaaaacattaatcttgttgtacagattattttgtcacccaggtactaaatgtggtactattgggtaccctaccactgttttatcaaacaagtttctgtaatagtataaatcctttgttgtcattacaacaatgttcatggcatcttcaccaggagtaaatctcatctcaagaaaccactttttttgcttatccataagaagcaactcctcatctattcaaatttgatcatgagattgcagcaatctggtcacatcttcaggttcactctaattcaagttctcttgctgtttctaccacatccacagttacttccttcactgaaattttgaacctgtcaaaatttggtaccttactgttgtgtaccaggtttagtacctgggtgacaaaataatctgtacaacagaccccccgtgataccagttaacctaggtaacaaacctgcacatgtactcctgaacctgaaataaaaaaaaaaaaaatgggaatttttaggttacaagttctttttctgtgaaataagtccccagccattgcatcaaatactcagtaaatccttctagcaatatgggagtgatttgggcaaaatcagaagaaacccacaaaaactctgttgcacatcattgtgctgaacctctattaatctcagtagggaagacaccaggctcaagaggccaaagaagacactcagagccagtaaatgagacatggggtcttattaggggcttccacacaagggagacagtgcagcgacagcgggctggacaagataaccacagggcccagtagctgcgggctggagaggaaaaccacaactgcctgcaaatgtcatgcagtttatgtagcatttccacttactcccctccctccaacaaccttcacctggcaaccttcatttaacccaaaactcagggcctcaatcccctgtacagcctgtgtttcaccagatgggccagggactcagatgtttattgtagataaggaatgaatctccaggttggccactcccggattctctagctcagaacacacattcaggtgcatctgccatacagggttgttctaagggtgtgcttcaatgatgctatcaggtgtgtttactgtacacacattaggatcagtgaatgcagaggaaagaagaggtggggaagggaattcagaaacaagaccgaatttggtaagactagggattcaaagcccgtggaggtcacaaaaatgtatgtctttggggattcatagaaatcttaggaagagcctttgtcttctaggaggttgtggaagcaatgttgccaattttatttgaatcggaaagcttataaaaaccttatacagggggattcccaggccagatggccgaataggaacagcttcagtctgcagctcccagtgagaccaacgcagaaggtgggtgatttctgcatttccaactgaggtacccagttcatctcactgggactgattagacagtgggtgcagcccatggagggtgagccaaagcagggtggagtgttgcctcacctgggaagtgcaaggggtcggggaactccctctcctagccaagggaagccatgagggattgtgccatgagggttggtgcattctagcacaaacactatgcttttcccatggtcttcccaacctgcagaccaggagattacctccggtgcctatgccaccagggccctgggtttcaagcacaaagctgggcggctggttgggcagacaccaagctagccacaggagttttttttagtaccccagtggcgcctggaatgccagcgagacagaaccattcactcccctggaaagggggctgaagccaggaagccaagtgctcatgctcagcggatcccaccccgatggagcccaacaagctaagatccactggcttgaaactctcactgccagcacagcagtctggagttgacctgggatgctcaagcttggtggggggaggggtgtccaccatttctgaggcttgagtaggcagttttcccctcacagtgtaaacaaagccgctagaaagtttgaactgggtggaacccaccacagcaccgcaaagccaccatagccagactgcctttctagatgcctactctctggatgcctcctctctgggcagggtatctctgaaagaaatgcagcagccccagtcaggggcttatagataaaactcccatctccctggggcagagcacctgggggaaggggtggctgtgggcacagcttcagcagacttaaatgttcctgcctgccagctctgaagagagcagtggacctcccagcacagcactcaagctctgctaagggacagactgcctcctcaagtaggtccctgacccccgtgtctcctgatggggagacacctcccagcaggggttgacagacacctcatagaggagagctccagctggcatctggcagttgcccctttgggatgaagcttccagaggaagaagcaggcaacaatctttgctgttctgcagcctccgctggtgataggcaaacagggtctggagtggaactccagcaaatgccagcagacctgcagcaggggaacctgacagttagaaggaaaactaacaaacaggaagcagtagcatcaacatcaacaaaaaggatgaccactcaaaaaccccatccaaaagtcaccaacatcaaagaccaaaggtagacaaatccatgaagatgaggaaaaaccagtgcaaaaatgctgagacttccaaaaaccagaaagcctcttctcctccataggatcacaactcctcgccagcaagggaacaaaactggatggagaatgagtttgatgaattgacagaagtaggcttcagaaggtgggtaataacaaactcctccaagctaaagaagcatgttgtaacccaatgcaaggaagctaagaactttgataaaaggttacaggaactgctaactagaataactagtttagagaagaacataaatgacctgatggagctgaaaaacacagcatgagaactttgtgaagcatagacaaatatcaatagctgaattgatcaagcggaggaaaggatagcaaagactgaagatcaacttaatgaaataaagtgtgaagacaagataagagaaaaaagaatgaaaaggaacaaacaaagcctccaagaaatatgggactatgtgaagagaccaaaccaacatttgattggtgtacctgaaagtgatggggagaatggaaacaaactggaaaacacacttcaggatattatccaggatcacttccccaacctagcaagacaggccaacattcaaattcaggaaatacagagaatactgcaaagatactccttgagaagagcaacctcaagacacataatcatcaaattcaccaaggtagaaatgaaagaaaaaatgttaaggacagccagccagagagaaaggtcgggttacccacatagggaagcccatcagactaacagcatatctctctgcagaaaccccacaagccagaagagagtgggggccaatatttaacattcttaaagaaaagaattttcaacccacagtttcacatccagccaaactaagcttcataagtgaaggagaaataaaaccctttgcagacgagcaaatgctaagggaatttgtcaccaccaggcctgccttacaagagctcctgaaggaagcactaaatatggaaaggtaaaaccagtaccagccactgcaaaaacataccaaaatgtaaagaccatcaacactatgaagaaactgcatcaacgaatgggcaaaataaccagctagcatcataatgacaggatcaaattcaaacataacaatattaaccttaaatataaataggcaaacatgccccaattaaaagatatggactggcaaattggataaagagtcaagatccattggtgtgctgtattcaggagacctatctcgtggaaagacacacataagctcaaaataaagggatggaggaatatttaccaagcaagtggaaagcaaaaacaacaacaacaacaacaacaacaacaacaaaacaaaaaccaggggttgcaaacttagtctctgataaaacagactttaaaccaaaaaagataaaaaatacaaagaagggcattacataatgataaagggatcaatgcaacaagaagagctaactaccctaaatatatatgcacccaatacaggagcacccagattcgtaaagcaagttcttacagaactacaaagtgacagactcccacacaataatagtgggagactttaacattccactgtcaatattagatcaacgagacagaaaattaacaaggatattcaggacttgaactcactaatagacatctacagaactctccatcccaaatcaacagaatatacattcttctctgcaccacatagcacttattctaaaattgaccacataattggaagtaaaacactcctcagcaaatgcaaaagaacggaaatcataacagtctctcagaccacagtgcaatcaaattagaactcaggattaagaaactcactcaagactgcacaattacatggaaactgaacaacctgctactgaatgactgctgggtgaataatgaaggcagaaataaataagttctttgaaaccagtgagaacaaagacacaatgtaccagaatctctgggatacagctaaagcagtgtttagagggaaatttacagcacttaatgcccacaggagaaagtgggaaagatctaaaatcaacaccctaacatcacaattaaaagaaccagagaagcaagagcaaacaaattcaaatgctagcagaagacaagaagtaactaagattaaagcagaactgaaggagatagagacatgaaatcctttccaaaaatcaatgaatccacgttctggtttttgaaagtttaacaaaatagaccactagccagactaataaagaagaaaagagaagaatcaaatagacacaataaaagatgataaaggggatatcaccactgatcccacagaaatacaaactaacatcagagaatactataaacacctctatgcaaataaactagaaaacctagaagaaatggataaattcctggacacatacaccctcccaagactaaaccaggaagaagttgtatcccttaatagaccaataacaaattctgaaattgaggcagtaattaatagcctatcaaccaagaaaagcccaggaacagaaggattcacagacgaattctaccagaggtacaaagagaaggtggtaccattccttctgaaactattccaatcaatagaaaaaaggtacttctccctaactaattttatgaggccagcatcatcctgataccaaaatctggcagaaacacaaaaacaacaacaacaacaacaaaaaagaaaatttcaggccaatatccctgatgaataccgatgcaaaaatcctcaataaaatactggcaaactgaatccagcagcacatcaaaaagcttatgcactatgatcaagttggcttcatctctgagatgcaaggctggttcaacacatgcaaatcaataaacgtaatccattacataaacagaactaatgacaaaaaccacatgattatctcaacagatgcagaaaaggcctttgacaaaattcaacactgcttcatgctaaaaactctcaataaactaggtattgatggaatgtttcttaaaataataagagctatttattgacaaacccacagccaatatcatactgaatgggcaaaagctggaagcattccctttgaaaactggcacaagacagggatgccttctcttaccactcctattcaacatagttattggaagttctggccagggcaatcaggcaagagaaagaaataaagagtattcaaataggaagagaggaagtcaaatcatctctgtttgcagatgacatgattgtatatttagaaaaccccattgtctcagcccaaaatctccttaagctgatcagcaacttcagcaaagtctcaggaaacaaaatcaatgtgcaaaatcacaagcatcctataaaccaagaacagacagagtcaaatcatgagtgaactcccattcacaattgctacaaagagaataaaatacctaggaatacaacttacaaaggatgtgaatgacctcttcaatgagaactacaaaccactgctcaaggaaataagagcaggcacaaacacactgaaaaacattccatgctcatggataggaagaatcaatattgtgaaaatggccatactgcccaaagtaatttatagattcaatgctattcccatcaagctaccattgactttcttcacagaattagaaaaaactactttaaatttcatatggaaccaaaaaagagcctgtatagccaagacaatcctaaacaaaaagaataaagctagaggcatcaagctacctgacttcaaactatactacaaggctacagtaaccaaaacagcctggtactggtaccaaaacagatatagactaatggaacagaacagaggcctcaaaaataacaccacacatctacacccatctgatctttgacaaacctgacaaaaacaagcaatgaggaaaggagtccctatctaataaatggtgttgggaaaactggctagccatatgcagaaaactgaaactgtacccccttccttatatcttatacaaaaattaagatggattaaagatttaaagataagacttaaaactataaaaaccctagaagaaaacctaggcagtaccattcaggacataggcatgggcaaagacttcatgactaaaacaccaaaagcaattgcaacaaatgccaaaattgacaaacgggatctaattaaacgaaagagcttctgcaccgcaaaagaaactatcatcagagtgaacaggcaacctacagaattggagaaaatgtttggaatctacccatctaacaaagggctaatattcagaatctacaaggaagtttaacaaatttacaagaaaagacaaccccatcaaaaagtgggtgaaggatatgaacagacacttttcaaaagaagacatttatgtgaccaaaaaaaatatgaagaaaagctcatcatcactggtcattagagaaatgcatatcaaaaccacaatgagatatcatctcacaccagttagaatggcaatcattcaaaagtcaggaaacaacagatacgggagaggatgtggagaaacagcaatgcttttacactgttggtgggagtgtcaattagttcaaccattgtggaaggcagtgtggcaattcctcaaggatctagaaccagaaataccatttgacccagtgatcccattactaggtatataaccaaaagattataaatcattctactataaagatacatgcacacttatgtttattgcagcactattcacaacagccaagacttggaaccaacccaaatgcccatcaataatagactggataaagaaaatgtggcacatatacaccatggaatactatgcagccgtaaaaaagaatgagttcatgtcctttgcagggatatagatgaagctggaaaccatcattctcagcaaactaacacaacaactatcccagatacagaaaaccaaacactgcatgttctctctcataagtgggagttgaacaatgagaacatatggacacagggaggggaacatcacacactggagcctgtcagggggtgtgggtgaaggggagggatagcattaggagaaatacctaatgtagatgacgggtagatgagtgcagcaaaccaccatggcacatgtatacctatgcaacaaatctgcacattctgcacatgtatcccagaacttaagtataattaaaaaaaaaaaaaaaaaccacaagctgcagggcaccagttccccaagaccaaagaaaacctcaaaagttgtattagcaattaccaacaaatatgtattgatcacctactgcatctgcataccagaccagacactgccaactctcagggcctggcatacagtaggagttcaacctctgcaaagctagactcatgaagagggcaaacctaaagtgtaaattttcactgaaattaccataagcagcaaatggccaggcagagtctatacctttgaggccttttttttttttttttaagtcagtctctctttctcctctctatctttcttgtacttgcttttgggcatttcaaaaaaaaaaaaaaaaacaaaccttatacaacattcaagtatgtttgaatgcacacagacacaaaaaaaggaaaaaaaagaaaagtttaggaagttcacacctcaaactgtttagctgcatgtggggaatactacttggtgtgagttatcaggaggttgaggggactgtttccttttttcagtacatatacttcagtattatttcaatcaaaagcacattaataaatatatcattttataatttaaagacaaaaagagatgcaaatgcccataatctcactgcccagatgtaataacttttaacatttaatatgcattctttctgattttttctctaattttaaatttatttttaaattaacatctttctgacgtttttatccatatgtaaatacatatacatgtatgtgcaaaaaatatcaaagtatactgtggtgtagcctgcttttaaagcttaatgatatatcttagacgtcttttcattttctcaaaatacggatatgtagcattttttttgagacaagtcttgctctgtcacccaggctggagggtgactgcaagccttgaactcttggactcaaacgatcctcccacctcagcctcccgagtaactgtgactacaggtgcatgccaccgtgcctggctaatttttaaaacttttttttttagagatggtggggggatctcactatattgcccaggctggttttgaactcctggcctcaagcaatcctcccaccttggcctcccaaagtgctgggattacagatgtgagccaccatacctggccctatcatcttttaatagctgcatgatattccattgtatatgtgtctcatggtttatgtaaccgattctctattaacggacattaaggctgtttctattttctttgctactataagcagcattgcaattagtatccttatagatgcatcttttcgcattttttacttacgtccatagaaaacattctaagagttggaattactggatcaaaggagagttgtgttaaaaattttgatacataatgtcctccagaaacaaccaatttccccttctaccaccagctatcagcgctcacatattttttgaatgcctactgtgttctagacaaataagacattatttttgccctgagggggtttacatgcttgttagttggtttgttaacacatactcagactccctatttatttaacaagctcttacacaatgcttagtaccatgtgccagatactattctaaggagcttaaaatattaagtcatttaatcctcatgacaatcttataagatggtactattattatttccactttacaaatggaggagctaagcaaaggagttaagcaacttgctcaggttcacacaggtgacaagtggtagagctagtagtaaaatctaagaaatatcctggctccagaatttgttcttaatcctgtgctgtggctcctcttggcacaacaggtaatgacactctcagcactgagataatagattcagtgacttggaaaacctcctttctatgatgaaagtgaatagggagatgggctttcaattggccaagcccatcctttcagggctaggagggaaagacatgattttgtgattttcagcttgagcacttaggaatctgccctttcccttaactgaaatgggtaacccacaagggagataggttgagggtggggatgaaagacagagacttctgttttggatttgttgattcaaaatgttgtgagctatccagatgaaagggccagacagcagagggaaatccatatttggtgcttgggagaggagacaggtccagaggagagtcctgagagtcaccagcctaggggaagacagtgaggccctgagagggatgtgatcccacagggaggccacacagatgaggaagagcagaggtccaaaggctgggccttgagaaatgcctccatttaagggaatggtgctcaaccttggctgcatgttggggtcacttagaggttataaaagctcctgatgcctgggtctcacctccagatattctgatttcattggcctgaaaggcaatctggctatcagaatggggtgtgtgtgtgtgtgtgtgtgtgtgtgtgtgtgtatgctttaaaaattattatttatttttggtatctgactttttaaggcttcccaggtaataatactgtgtagctgaagtgaacagcaatcagttaaaggggatgacagaagagaaattcaagaagccatctcacagggccagagagagggtagaagtgttttcatttgttccataacatgcattgagtacctaataataatagctaccacctagtgaaggctgtggccaggccctgtgctgagtcatttgcacacattatctcatctaatgctcacaccacacaacattatgagatattcttacccccttttgcagatggagaaactaagaatcagagaagtcaaataacttggctaaagtcatacttctaaaacttagtgggagagtcaggattccaatgtggtgtaggatatcttccaaacccttggagttaatcactgtgctatgctgcccatcacctgccagattttctgcttggaactgtcaaggggcttgcggtcttgtgggtatagaagagttacacataatgaggtaagtgctgcggtggaggaaggtaaaatatcccggtggagaaagctcataatagcctggaggactcaagaaaagctttgcctatgagctaatgcctcgggaaatattttctatttattcctgcacccagaaacaggctccacctcttgataggaggggaacacatgtctgtagggagaaaagagttgatggtggccatcttgaaggtaaacgactacagtcttgatcctgggcacttctgagagaggcctggtagctgttaactttcctttcagaccctttgggtttatgaagatgacaaaatctctcaagcgaatggcagccagattggtttctatctactttcatttatttatttacctttattttaatttgagagacagggtcttggtctgttgcccaggctggagtgcagtggcacaatcatagctcactgctgcctgaacctcctgggctcgggtgatcctccacttcagcctcccaagcagctgggactacagtgcacaccaccacacctggctaagttttaaaattttttgtagagacagggttttgccatgttgcccaggccattcttcaactcctggcctccagtgattctttcagcctcctaaagtgctgggattacaggtgtcagccactgtgcccggccatctgtctagttttaaactaccctatagtaagatccacaactactgggaaggggctcctagccttagtcacactctgaagaattcttcaggagcggagcagccaactgggccagtgatagtacccactgccttcaagagaaatgcccttacataaagtttgatatcttatttggaaaggtgtcttctaagtcaatgtgaatttactgcatttggagggagaaagggcacatttcaactttcagaaatgggaagctaaaagtgggcatcagtcagggttgtcatcaccttatatatcataactgaatttgtgctgatgtcatccttgactacatgagtcagaacataataaactttaaaattgccagaagaaaggctgctgctcatgcttgtgatttatgacacaaatccaaagctgctacattttctgcacttaccatttatatttgcatgaagttcaaagggggaacaagaagcttaactctttctctgacgtggtcaacaagactgtagtctcagaaggaaccagatttgctttgtgcattttaacatagggttcttagtgtctgtttttgattgagagagacacctttgcattaaccacacaacttcactctctgttccatccctgaggctgctcaagggaaccagcttattataaacaggtttaattgaggttccttaaaagtcagggagttgagaactcttttatttgaatgcaatagctgtatcaatttgagatgcaattagtggccaaatatataattttatacaagtggtcctcaccaatttgcagacttttaaaaattaaatttactattaatgaaattattcaggggtaagacattcaacattaggatggttaaaaatggcaaggaatgtttatattgcttcaggctgctttaacaaaatactttagacttttggtggtttataaacaacacttatttctcacagttctggaggctaggaactccaagatcaagttgccagcagatttggtgtctggtgagggcccattccttatagacagtgccttcttgaggtgtcctcacaggatggaaggtgccaaagagttcccttataaaaagacatgaaggtcgggtacagtggctcatgcctgtagtcccagcactttgggaggctgaggcgggcagatcacctgaggtcagaagttcaagaccagcctggccgacacggtgaaatcttgtctctataaaaatgcacaaattagccaggcatggtggcaggcacctgtaatcccagtttctctggaggctgaggcaggagtatcacttgaacccgggaggcggaggttgcagtgagccaagatcatgccactgccactgcactccagcctgggcaacagagtgaggctcagtctcaaaacaaaacaaaacaaaacaaaacaaaacaacaacgacaacaaaaacagacatgtgagggcatgctttctttccccctctgctctttgccatgtaagagtacaatgagaagatggccatctgcaaaccaggcatcagccatcaaccagacactggatctactagcaccttgatcttggacttctcagcttccaaaactgcgaaataaatttctgttgtttacaccacccagtctatggtattttgttacagcagctcaaactgactaagacagagggaaggatgaaagagacttgaagacttgaatgtatttaaatgtgtagacgtgaaggaggcaaggtgggggtggggggcaggagagagagagagagagaatgagaatgaaagaaagatattgattgattgattttaggtccagaggaggatgagaatcatcaacaggtggaagggacagcatccagttgataggtgaagaggtttgttagcaggatgttgttggttgcaacccacccagttgcttcaagtaatggagtttattgacagtttgctgtatgcatggaaacccaggaaaagttgaatggccagacttaggaagagcatggccctagcagtgctgggttgcagattttcaccccagagcacccatttacaagattcagtaactcttggctgggcgtggtggctcatgcctgtaatcccagcactttgggaggccgaggcgggtggatcacaaggtcaggagttcaagaccagcctggccaagatgatgaaaccccgtctctactaaaaaaatacaaaaatataaaaattagctgggcatggtggcgggcacctgtaatcccagctacacgggaggctgaggcagagaattgcttgaacccaggagatggaggttgcagtgagctgagatcacaccactgcactccagcttgggtgacagagggagactccatctcaaaaaaaaaaaaaagaaaaaaaaaagattgagtaactcctttgccagctctgagcatagcagctggtatctttttttcagtgcctccagttcatgtcttggggaaaaatatctgattggcctagcccattgttttctttcaggccacatcatagactactggccagtccatgaactggttgtgcttaagtcaagaggttcacttttgatccaaccagtggctacctttccttttccttccaaagaacagatagatgattgcttccatggagaggagaaggctatatgggtcagggaggcttagtagaaaggggagttaggtccagcaaatcttcctctcccatttttccttcattttaaaaactataaagtaaatagacacttacagataaacttgagtcacctttgttcctaaactcacttttatttccttttctctctctgtcctttccattctttttcagagaggcagtcactgtcataaacttacggattgctttggaaaaaacaatctatgtggaattgagtcttcctatttatgaacatggcatatctctgtctttaggtgttctttagaatttccaataatgttctgtaatttcattataaagttcttacacatcttatttattcagaggtatatagaatgctgcaacaaggggtacttttttcctattataatttcttactaattattattggtataaaggaactccactgattttaaaattttgtttttgcaattggcaatcctgatgaattctcttattcttataatttttagatatcttgaattttctatgtcagcaatctgcaagtctttatttcgaattcttatgcattttatttatttttattatgtaaattcattgattagggcctgctttacaatgttgaataaaaaaggtgacagtgagcaactaattcttgacttcaatatgcgtacttctaaagttttggtagcagctataatgtttgttgcaggtttttggttaaaaaaatcctttatcaggttaagaaagttttcttctgttcctagattgtaaaaaagttgtaattttgaatgtaatgaattccatgaggacatgggtttttatctcttttgtccccagtggctagattagtgcctgtaggccatgagtaaattatttattgaaagagcaaatgaattgattaattggagcttataaaatattttacttttgacatgcctattgatataattatatacttttccttttttaaatcattaatgtgtctttttgctcattgaccaattgcagctcatcacatacacatgggactcacaactggatttctccttcccttgtagatgttaaaaaaactacaaaattacggccatgattctttcattcatttattcatttgatgcatgtttattgagcatctactatggatcaagtattgtggtagctgttagaaagccaaagctaaagaagaaccaatcaatttcataattcagtaatgaattcatgacatcatattgttggaagagatcttggattagatctgatccaaccttcttattttgctgaggaggaaatggaagctccacaggcagatatgattagcttatgatctgtccaatctgtttaattcagaggattcaagtgactctgagacacgatatgtcaggagggtctactccaggacaactattgagaagaaagaaagaagaatcataaaaatattaacatcagttgttcatgtattttaggggagtagtataattttccttaagggaaaaatattgttttatttaagaaagcctgataatggatgtttgcttatgaaaagagagactcaaggctaattctggatttgagaagttgagacaatggacttgaatttgctgtagataacaaatcagcaggacttttcagctagcccttgtggatttggggcctggaactcaaagaagtgagagaataggaaaacagagcatacgaatatgatggcagatcaagccttaaggacagagtccataaagacagactatctgataaactttatcaacactaatatctaatattcagttttgagctgtataccgttctgcatgataattttccttggtaatgcctaaaccttccataaagttgtactggtggtgccataaagaattgacatgaaggtgtggacagacttaaagtgacattaggtcttgcttacaccacgctcttcttgaggtcagtcttgtagtagggcagcagcattgcacctaaggagttccagagttctagatggtgaccaatagcaaagtaagttggggaacccttggatctcatggttcaaaaccatgttatgagggagggacagggcacagaaagaagagaatcccctttaatcctaaaatactagaggaagattggtggttgttcactgttgtttgcatatacagtctggtccctcatagggactgaccatttgtgccaggtattgctactgccaagctattgtttcttggatctaaacccccacatccatactgtatacttgggatcttggggctgggactgtgaacagttttcttgtttgccggctggccctgttaggctctgccagtaggtggtgctagagagagagagagagactgccaggctggagctgggagaagggatggctgccttcccgcgggcttccggtctgtctctgagcatcactatagcgattcaccctggcggcagcagtgcctctctgtagcagccgctgaatctactgtgcagtttttccagcaccacagaaccagctgtctcctgtatccctagagacaccggcaccaactggctggcatcccgccctcacggatctgagtttcacctccatggaacacctcctgattcgagcttcaactgttaataattacaatctctctcctttattcccccagccttaagggattaggggctcttccctcagtcgctacttccatgataccctagaattctcttttggcatttccagttacctagtgagcagttctttacattctttcttgttcaaataactggcgtggtttctgtctcctgactggaccgcaccggatacactagcaatctctttaggggaacttcgggcttgattctggctgtagctgggatcctcttgggctagggcaggctggccttcaagtcttccactccagggtcactttgctgcttgccatagaaatgcctggtcaagcatgcccaccaagactgtcgccttccgtgtatctccctctccactgagcacggataccttctgggtcttctctgtgtcaggtgcaagctgctaggggggcttctgccctctcttgtctggaaatgcttgctgccatctctttattgtcctgcccatgtcttgtactatgcatggcattggtaggactctcaatttctaatgttaatcaagaaagagcacagtagggagcttggtgcagtggctcatgcatgtagtcccggttacttgggaagctgagtggggaggattgcttgagtccaggagttcaaggctgcagtgaggtatcatcgcaccactgcgttccaacctgggctggcctgactcttaagaaaaagaaatagcatgttagtccacacatttacagatacacctaaatttccagaggattctctcatatttttctttcactttccctgttttttccttgttacttggaggaccttgagctactatgccctccctacattgctttaccttccaccatctcatctcctatttccaggcctttttatcttgccttagggcagagggaagaaaaataagttctcccaattcacacatgccctccagggatttttctctcctggcctgttgtccactgtacctggcagtttggaactcaccttcttccacgccctcccctccccgcctcgcttttaaaagcttcattgtaggaatttttcagaaacatgtaatttgaggtctcatattgccgtctggctaaaagtgaacatgccattgatcaatctgcttttattatattatgttcctaatggtggcaagcaagacaagaagtagaaagaaagatggtgtaagctcaagaacccactaaatctatcctatggcctgggttcacccagcctgctttgtggattttgtctcactataacagagctcccaaggagactgcagagtcagctcccttaagcactgtaactaaagcctaactcttccgttccacccaacaatgtccccagctcatcctctttcccgaagtcccctttctgccccagatgcgaattgcatttaactaatcctcaagtgaaatgtccacacagaattccattttaattagcataccatagtttttgtgcaaatttgctttcagaggactcccattgcagctgctcagagacgctaatggcagggcctcttgatgctttcccgatagctttcagctgcaatagctcttaggcagaatgccatgagcgtcctgcccaactgtattactggggaacacctgattggctagaagttgatcctcctgtaacttttctgagttctttacatttactcgtgaaacccaaatatgccacttcttatcaggatgccatgaaacgtaagtgtctaggatgaaaagaagaattaggctcgagactattttcttccttctgtaccatgaaatttaactactaagatggattttaaaattgttttgtccagctggctcattttataactgggaaaagtatgtttcccccctacttttttttcttttggcttgaattggtgctagaatctccagctagtagttcttaatgctggatgcacattagaatcacttgggaacttaaaaaaaaataccaatgccaggccccaacaagaccaattctgggacttcagaattgctattttttcaaagctgtgtatgggctgtattgtgtccccctcatctatacgttgaagttagaatccccagtactttagaatgtgaccgtttttggagatagcccttttaaagatgtaactggtcgggcatggtggctcatgcctgtaatcccagcactttgggaggccgaggcgggcggatcacaaggtcaggagattgagaccatcctggctaacacggtgaaaccccgtctctattaaaaatacaaaaaattagccgggcatggtgctgggcgcctgtagtcccagctacttgggaggctgaggcaggacaatggtgtgaacccaggaggcggagcttgcagtgagctgagattgcgccactgcactccagcctgggagacagagcaagactctgtctcaaaaaaaaaaaaaaaaaaaaaaaagatgtaactaaggtaaactgaggttatttgggtggtccgtaatccaaaataactgatgtccttataagaagaggtgatggtggctgggcgtggtggctcgtgcctgtaatcccagcactttgggaggctgaggggggtggatcacttgaggccaggagtttgagaccagactggccaacatggcaaaacccctactctactaaaaatacaaaaattagccaggtgtggtggcacgtgactgtaatcctagctactcaggaggctgaggcatgagaatcgcttgaacctaggaggtggaggctgcagtgagctgagatcacaccactgcactcccttctggacaacagagtgagaccctatctcaaaaaaaaaaaaaaggtgacaaggacacggatgtatacgggggaagaccatgtgagcacactggaagaatatggccatctacatgtcaaggagaacggcctcagaagacactaaccctgtcaacaccttgatttcagacttttagtctccagaactgtgagaaaacacatttctgttgtttaagccacctagtttgtggtactttgctatgtacctgagctgagcaatacactgtcatgccagactcctattaacttcaacagggatggcaccatgttcaagaggctgatgaagagacccagagccagtgaatgagacatagggtttatggaggagacttacatacagtgtggtccagcagtggtgggctggacaggagaaccacaactgcttacaaaagcatgcagtttatatagcattttcacttagcgccctccccttaacaacctccacctggcaagcttcatttaaacccaaataaagggcctcaatcccccgtatgacctgtgttccatgggctgggtcagggcttcagatgttcctcacagataaggaatgaatctctaggttgaccactgctggatgccttgccgcggaactctgagcacacgttcttcttctgaagtttagctattgctatcacatgtgtctgacatatatatacttcccatgtaattctaatgtgtagccaagactgattgccagtgggctagaacggaggctggaacttagcaggagctgcagaatcagattttttgaataaaggactgagttttctaattctttctagtgttcatgccacaataccaagtccacaaatatccaaatctactggaagaatctacaaatagtaataatttcctagtatgatacctactctcttcctgaattctctgctgaagccaaactggttttctcaccgttcctgaacactgaccaagttttcgtgcctctgggcatcttctctttttctgattggtatgttctcttggtttctcacctgcttctaatgctagccatccttcaagcttctcctatgaccctagtcagaagctatgcttttcctcttctgggctcctgtagccatccttgattgtgagagcaacttggcatttatatatgcacactcctgatatttactctattgtcctctaggaagaccaccagcttccatgacatctggaggcaggtagaccaagcttttgccttggctttgcccctagccaggtagctaattttgggtcagtcacattctctgtcgggatctcttttccctcgcctgttacaaagctgggctggatgagttcctgtctagttcaaacatcccctggcctgtgggtcaatagtatccacagctcctctctcagctttgttggccactgcctgccacagagcttggcattcaggggatgcttaataaatatgtaatgaataaatgattgaatgaatttgtacgtgtgtcagatctgaaagagacatagcatcagggcttggcaaatagtgaaagctaaaaaaaatctgagcagctgaatgagtgaatgaatgaaggaggggaagttacagatcagttggtccaatcaattcattttatagatgagaaaactaagatataaaacattctcagaggggagtttatggctcatcttttcatctgagtgaataaacagagcccattaacaccccaaactgaatatgaagtgcaaacgctataaggcaaaacatcaattagcacacatgttgtcctttcattgaaaagcttcttgaatgcacacatttgaggaagaactcccttaatagccctctttggagagtggaaagattgctggaccctgtgaaagaagatgtggcctctgcttatggctcttgagccttctctcacattgatttatcttccttcttaaaaacaaaaacaaaacctggaaagtacagtggatgatttaacaaacactcataatctaacagtccagaattaaaaatggttttgtcctatttgcttttcataggagatagaaactcttataagtaaagataagcctcattttcagccccgtgcactgacccagtccttctctccctacaggcagttactaccctcaattttatatccttctgctccttttttcctcctcttgtttttgaatacagctttgtattttgtctctttgaattttcatattaataatgttttattaaggtacaatttatatacagtaaaagataaaatcttaagtgtacttaacatacatttgacatcaagacagaacctatttcagctgggtgtggtggctcatgtctgtaatcccagtactttgggaggctgaggtaggcaaatcgttgagctcaggagttcgagaccagcctgggcaacatgaagaaaccctgtctctacaaaaaattacaaaaattagtctggtgtagtggtgtgcacctgtagtcccagctacttgggagactgaggtgagaggatcgcttgaacctgggaagtcaaggctgcagcgagctgtgattgctccactgtattccatcctgggcaacagagtgagaccctgtctcaaaaaaataaaaaaatgaaaactatttctctcactccagaatttttccttgggtccctttattgatagtatgatctcccctaagagttagcctaatttttattacaatagatagttttgcctgttcttgaacatggtgtaaatgcagtcccataatatacactcttttgtgtggcttcttttgttcaacatcatgattttgcaagtcatccatattgatacttgtctcagtaatttatacccttttattgatggatactatttcattgtatgaatataggacaatttgtttatcccataactatgtatttttatatatttaaaaatatcattgtaggactgttttctgggcagtctaggaccaaccgagtttccaacctcatttcagtcttttgcttgtagttctcaagaataactgcagaaggtgctgggaattcaacatcctgagataaggagaaactggccagaagagcctgggctcctccagtccctgctagaaacaggatgtcctttagcacttcagcgcaatgatcctgtgacttctggggtatagaacccagggtgggctgctttctagggtgcccagctgtggtgtaagcggggcatgagaagatgagatgagactccatctgcatgagcagctttcctgagcctcgggggaaccagcttgtcatgaatcctagtcttctgttgtcgcttgctgtctgtctgtaaataataagcctgcttcatgtcagttgcatgtgtgagtgttccgtcttctcactgaactcacacaagtagcaaaagtgcagccccagatgcagggggttgaacctgcctcctaagcatgtccagcatgtctgcttttatagtggaagtggggattatgtatgtgaactttcctgattttctttttccttttctttttttctttttgagatggagtctcactctctccccaggatggggtgcagtggcacgatctcggctcactgcaacctccacttcctgagttcaagtgattctcctgcctcagcctctggagtagctgggactacaggcacgtgccaccaagcccagctaatttttgtatatttagtagagacggggtttcaccatgttggccaggatggtctcgatttcctgatctcgtgatccacccgccttggccttccaaagtgctgggattacaagcgtgagcccggcccttcctgacgttcttaactcttagaagcatttgtttctttctctgtgaaatgattttgctgaataaatgtgccctgtgagacatttctcgaaagaaaacataccagcagccaacacacttatggaaacatgctcaacatcactaatcattggagagatgaaaatcaagggcctggcgcagtggctcacgcctgtaatcccagcactttgggaggccaaggcgggcggatcatgaggtcaggagatcgagaccatgctggctaacacggtgaaaccccgtctctactaaaaaaatagaaaaattagccaggcatggtggcgggcgcctgtagtcccagctactagggaggctgaggtgggagaatggcgtgaacccgggaggcggagcttgcagtgagccgagatggcgccactgcactccagcctgggcgacagaatgagactccttctcaaaaacaaaagacaagaaaagaaaaaaccacaatgagataccatctcacaccagtcgtaatggctactattaaaaagtcaaaagacagtggatgctggtgggaatgtaaatttgttctgccactgtggaaagcagtttggagatttctcaacaacttagaacagaactaccatctgactcagcaatcccattaccagttatatacccaaaataaaataaattgttctaccaaaaacacatatgcgcttatatgttcattgtagcactgttcacaatagtaaagacatggaatcaacctaggtgcccatcagtggaggactggataaagaaaatatggtaaatatacactatggaatactatgaagccataaaaaagaacagaataatgtcctatgcagcaacatggattcagctggaacctgttatcctaagcaaattaatgcaggaagagaaaaccaaataccccatattctcactaataaatggaagctaaacattgggtacatatggacataaagttgggaacaataaacactgaggacagctaaagagggaggggggtcaagggctgaaagacacctattgtgtgccatgtgcactatctggttgatgggaccagtcatacccaaacttcagcatcctgcaatatgcccctttaacaaacctgcacatgtacccccgaatctaaaataagagttgaaattatgtattaaaaaattaaagttaggcctgttcctgtccccactaaatagatattaaataaatatttaaagaatatctacttgaggtcaggtgtggtggctcatgcctatcattctggcactttgggaggccaaggtgggtgcatcgcctgagtccaggagttcgagaccagcctgggcaacatggtgaaattctctacaaaaaatgaatgaaattagcctggtatggtggcacatacctactactcgagaggctgaggtgggagaatcacctgagcctgggaagtcgaggctgcagtgagctgtgatcatgccattgtactccagcctggatgtcgaagtaagaccttgtctcaaaaaacaaaacaaaacaaaacaacaaccaccttcctccccccaccccccaaaaaactacttgaaatggcaataaactattagtctgtgcaatgtagtctcacgttccaggcagattctgtgtaatccttgactaagcatgtccaagcctctgaactagcatagcagctatagttggaaatgatatagacatttaaaatcaataaaatactaagaccctgaaaaaaattatgccctgtgaagggaccattcccagactgattctggaataacctggagccatgttttctggccttcagaaacgcccgggggggcttaaaagtcatccttaagattcagagtcagcgggtttgggatggagttcaggcgtttttttttttcaagttacacgtggttaaaaattactgtctgaaagtctccaataattttaatagctcttgtgaaatttcaaaagaagtactcaaagaatttcctctactggggagggtgaggtaggaggagctcttgagcccaggagtttgagggggcagtgagctatgatcgccactgcactccagcttgggtgacagagtgagaccctgtctcttaagaaaaaaaagccccaacaatgcaagacctatggcaagcaaataggtaataaagtggcaggtattaccaatcactaggaggaggaggggatgttttaaaatcaaaccaagctctttaggatgtgttggaaaagtccctggcctggctctgggagatctgggttctggctccagctgtgtgactttgggcaagttgcttactatctctgggcctcagattctcccattagaataagaagagctggggctagaaagttcctgagattctctccagccccttttctcagtgcttctcagatacaagaggaggcctgcatgaaggaatttggcccagcactcatccttattgtggataatacccatgggaggggtgcctccttcctgctagattaattttatttgtgacaggcctatgaagcaaggtaaatcctttgattcacatggatcctttgcaagaaaaaacatgtagtttggagcagtgagaaatataaaaacactgctaagtctgtgagagggatttgcacgctactgcaacattggttcatgcctctgtacgtgcaagggaacagcttatgatttgcctgcaggaatcagaattgcccatccacagcatgtaactgcaccgacatgtgtgcctcatctagaattatagtctgcagaaactagcatggtgtcaggcacatagctggtgctcaataaatacctgataactaaacaatctatttggaggtactttgaggactctccttcttcagtctggggagagacagtcgttgatccccctgctgtcaccacacaatttatatttgagtaatggacttcactgcttgctgctgctttacacccacagagggagggtttgaggaaataggtatgtttggggtgggtgtagagagtcgggggcagaattcatacacaagttttcttggatccaaattaccctcaatctgagaaagggggtggacattatgagaatcctttttgaaaagcagcctcttccccaaagatatctagagcaagcagtttcatttaaaaaggctttcttgatttttctggtcctcccccgcctttgcttttgtagttaacatttacatactaataaagtgtgaatatattggtacaacaaacacttggcatttgagaaaacaaaggtcagcagatattaatctaaaacaaatactagctaatggttttttaaaccattttttaaacagataaggaaatttgggcaaaagagaaaagaagtgtcttctcatctaactacctgccaattgtatggagaaaaacctcagtctcctataggaaaaaaaatcgtctgaatcaataatgactgaggaataaccataactgattagaaagcttgtgggtctcctttcatctttaaaaaaattgtggtaaaaaatcatgtaacataggtagggtatggtggctcatgcctgtaatcccagtactttgtggctaagaggggaggattgcttgagcctaggagttcgagatcagcctgggcaacatagggggaccccatctctacaaaaaaataaaaaaattagactgccatggtggcacctgcctgtagtcccagctactcgggaagctgaggtgggaggattgcttgagccccggaggtcaaagctgcagtgagccatcatggtgccactgcactccagcctgggcgacagagtgagaccccatctcttaaaaaaaaatggaacaaaaagttctccattccaaccacgattaagtgcacagttcagtagcattctgtattcatgttgtcatgcaatagatctccagaactttttcatcttgtaaagcaaactctgtacttctctttaacttttgaatgctggaaaaaagcaagataaacatgttctgaaagggatgagttatgtctgcatgttgtgagaatctggctttactcaagggatggaaaggagaaaattaactaaattaatatttattgaacacttgctagctaggtgccagtccctgtcagataacatactctgctcctctgcagttctgagatcccacatgtcttgtttttgttgatcttgttcacatgaagatgttacaggagggtgtaattctcccaaatttttttttttttttgctaaaccctgactatgcatatgatacatagaatctggagcacttgacaggtttttccaggactctgagcatcagttttgctcaccagtcctgctcaccagacccacagaggagcctggggctggtggaggtggggcaggactcattgcctagtagctgtgctgacataggcagaagaattgctaccgtactcaggtcctggttgtgtggcttttcaacttctttattccttgctctatttcaaccaagcttgtggttgtgggttgagaaacaaatactactcaaccatttaaagaactgataaggacatttgagcgaaggggaagagaaggtagaacattagagtgaagctgtgtttgccacacagtctctacccagctttctgattctggagatctaagtctagtttcttcttaagaggagcacctactatgtgagatttaaatactctgagcttcagttctccatttataacatgagagctgttaatttttattttatttctttttagacacagggtcttgctctgtcgcccaggccagagtgcagtggtgtgatcaaggcttgctgcatcctcaacctcctgggctcaagtaattctcctgcctcagcctcccaagtagctgggactacaggcatgagccatcattttgggctagaaggggactgttaaaagataaacttttacattccaatttttctgtatgtaaaaaaatgatgataaactttggcacatggaaattttaaacagtttttttaagcagacagtgattcatgaaacaggcaaactagaagtgggtaagggctctccctaagaggcatgaggagaaggcttttgtagggtaactgcagaaacacagcgaagaaattatttgcttggttaaagtttgagcagtttctctatttggactatcctggtgggaagttcaagacaatataactaatcccagttggctgtttgtaagtttgctagcctgttttgctttcttttaaattctgagtttggttttggtttgcttatgtaggaagacagggtgtcagagtacgcagtccagtggtttcccatttaattatttttaatagaaccaaactctttacctccaagggtcatgagaattacattagaaagcactatataaataaattattgttatcataacagagattccttttttcaacccagctcagtcagcatctgctaaaaatgaattatatagacgaaatttttaagcaagtgggcacatttgcagcagtaggcaatttccttagcctttttgaattgtggatgtttttttccatcaagtcattacagaatgatctgcagaacagaatttacaatgttttgacaaactacacacacacaaaaaaacccctgagagttagttctaaatatccaggtctccaggtatcactctttcaatatttcctgaaatttttaatggaagttctctacatggttaggtagggaagtttgtgcttcagtggaaatttatgcattgtttagagcatactctttcaggttattttattctgattatatgggagctttgcacctgttataaatggaattctgtccccccggaagtaatatgttgaagtcttaactcccagtatctcagagtatgaccttgtttggaattagggtctttgcagatataagatgaggttatactggaatagggtgttcccctaattcaatatgactggtgttgctataaaaaggggaatttggatgtgaacacacacaaggagaatgctgtcatgtgaagatgaaggcacagatctgggtgatgcctctatagcccaaggaatatagcagattgcctgcaaaccaacagaacttagatgggaggtatggaatggattctttctcacagacctattgacaccttgatagtggacgctcaacctttagaactgtgaggcaatacatttctgcttttcaagcttccccatttgtggtactttgttaaggcagccctagtaaaggaatacattgcctttgagttattttaacctcaaaattgtaggtaactattagcaatgcaaaataattattgtctatagacatgcaaattttgtcctctccacgtagagacttaactggcttctttcccctactgtgaaagaagacagttttgctttcatttgcatgttcatttcgatattcttcatctataaacgtgtctgctctttggtttgtcctttgagttggttgttaacatcttagttgttccctcatttggtcatgaatcaaataaaatcttgaacacaagtttagtttatatctatatgagtctcatgattttacatttttttgggggaaaattatcttttaacagttccttattatcgcagagttcttccatgtgtttattttatatacttatttattaaaaaaatttttctttttctgtttttgataatagtgttccaatgagtcagagacagatgcatctatgctatattgatgaagggtcatctgtgggacacaatagctctcattatacttgaagctgctattatcacttgaaggaggaagcagtcattccacgtttcttctagcagctgtcagttacagagagacagaatttggttcaacaagaagataaacttgctgatcgtcagagctaagacaaaattaactgtcttggaagtgaaaagtttttgtgattgggtggtgcaggggggttgtctgcccttttggtgggctgtcgtatcaacgtttaaagatcaaagtgtcggctggaagttttaggtccctcctgggcatgagaatcaataatctgaagatataaagacagacgttaacatcctctcctctgcctcttctcttacttccatatctagcactctcttgcctttgctaaacaattccaagtcctttctccccgattctgtagtcctgtaacctctcagccaatctctcattttctcttcaatcttgagacatctttggttttttttttggaggagggtactgctttctcatcattagcttgagttcaccagactgccttccagactgagtcaggatggaacatttggagcctgtcctctgagcctgggcctgggggcttctagtgcagcaggttgtccgtgacaaagatgtcactgataagtggctaagagacacggtgaatggggtgttactgcctgacacactgtctggggctgcgatctagcaaaaacttggaaggtataattaatgccatacgtgtgttgtgtaatgccataataaatctgcctgtgatggcttctcatgggcgttttctaactcttggtgttaagcttcatgagttcccatcactgctttccaggcatgtcatcatttccagcttataatttgcaaaatgagagagacacctattagcagggagccagttaaggttacatcagtgacttcattatacaccacacctcttgcaggtttataattatgcagttaaaaaatgaaaaaaaattgccaaaggcagttgcttgacataaatatatagatccagtccacaagaattattgatataattttgttttgccttcttttattaaaaaaagtagattaaaaaaagcagtgagcatctttatctgtgtgcacggaaattccaacgtagtttcaatgcatgaagtttatgggtgtaacacgggttttatcttggatcttttaaaaaacttaatttggggacgggtgcagtggctcacgcctgtaatcccagcactttgggaggccgaggcaggcggatcacctgaggtcaggagttcgacaccagcctggccaacaagtgaaaccccttatctactgaaaatacaaaaattagccgggtgtggtgacacgcacttgtaatcccagctaccctggaggctgcggcagaattgcttgaacccaagaggtggaggttgcagtgaaccgagattgtgccactgcactccagcctgggcaacagagcgagactcggtctcttaaaaacaaaaaacaagaaacaaaaacaaaaaacttaatttagctttggcaggcagcaagtcactcttgctgtaatggaaggtgaaccctctgtccatttattgttgaggatcattattcttccaggatgctgctattaaagattgcgttgcagattcaaagggtgatggtgagacacagatttgaccaagggcaggcagctggttctgagtccttactaggggcaagtataggggccctgttacctaaacaatgatctgtaagcttgagtcaagtagcataatgctgtgatatgctagcatgacatcaaatcaaccagaaagacagtaattcagcaagtccacaggcagctggccatctttcttcatccacggagaagctcctttccctttattcccatctaatgtgaaccctcacctcattagccagaggtccacagtcagtgctagccatgcagagctcagtgaccactggggagtctgcagtattgagctctcagagccagagttccctccttccctctttctgctgactctttactgggaaactcatgtctatcaggtccaagtccttggatatcctccctcaatttactggttattccatcatgtctcattacacctccattacaatgagaagagttgcttaggggtttcttctcctaggagaaacgtattacatctcttcatgggatttctggctaatccattaactcaagaaaattgctggctccaagggtattcacactgtaaaacatctctttttcttttcaaataagtgtttaacttcataaatcatgtatcccaaagagaatcattttcacaccttatgaagatcaccaaagagaaaatattatgtctccttttatttttctttgcaatttgagaatgtatttatctctttaggagtcatgattatgaaaaactcaaggtaaatggagttcttataacctatgtcttatttcaccactagtttacatgatcatctctgagcttaatttcaggttaatttctctctgatggtcatttagtgagagctcccagtgatctgcttccaggttttacagtcaagttgttaatgatccataaaccagccctttaatttactgaagacttggtatttttcatgtaaagacatttcaaggcaaaaagagttctggaatgcaacggatcatacctagtttctattttataaaatcagatgcatgtctattagttgttgtgtaatggcatgtgggaaaaactgggcgtcaggaaacctgggttttagacctgactttgctgctaatatggaatagaatcagtgtctgacgatatttgacataatcctgatactcccatctttgtctatggcagacattgctaatcaatcaagataagatttcaagtggagcccagagacagcctcagaattcttctcaaagtggctctctaggctgctcctgctgattgattaggattactagagatgaaaactacttgccactttagggcaaagcaattctcttttgtccaaaattctattgttgtgtatacatataatcaatgttctttctgggggaaaaagataaattaatagaagaatacttattttttttctacccgaagaactttggattttcaaaggtcagaactttgatggggtcttcatgagatgtgctggaagctcaggaacttggctccttgggaggtgcaggaggtcagggctcagacagaggctgaggacactcacccagctgcactgaatagatttgataagagtggcttggagatacaatagccaatgtggaaatcaaatagatttgataagaatggcttagagatccaatagccaatgttgaaatcaaacagagttgataagggtgtcttagagatccaatattcaatgttgaaatccctatttaagcttgtgttagcaggtgttggaattcagggagcccagttttgggcaggaaagtgggcatgtaagcagaagatgatagagcttcaagagggtgaggtgtccattttcacatctacacatagcaagttcataacttgtttacaggggtacaaacagcagtgttcagcttccagagagagatgggggctggcagatccaaggcaggtgtccaagtcctagccaagagggtatgcttgagtgagggctagagttgagatggggagcttgcaaggaaaagctgctttattcagggtttacccccagcacactcaataccagtttcagggcagagatgttatttacacctgccattagacctcaaagggagagtctgaggaaagctggggtcattaccgatattggcaagtgtttagatttcacagcactcacgtgctgggactttgtgcacaaataaccaaggatctgtctgacttgcaaacaggtcctacactgatgccaactctctcagagtcagacttaataaaaaagtgtctggagttcagggcgcgggtgtcttccataggctatttcagagctgctggaggctgaggacacataactcttataaagcttatgggaaaattttttgattgaattggatctggagactgagtccagtgagaagttttgatggcgggtttcttttcccagttgtctcttgatgtgctgtgggaactgagcttaattaaagacctcatgctggagatggagctgtccaggaaacctaagtagcctcacatgctctttcatagtcattgccacttaacacagaggaaaatctgcccccaccccccacccccaccccttggcctggattgggaataggactctttttcctttttttttgcacccaattatgtgctgcctgctttgggtctgtttgtagtaagatctggatcagatcaggttgcggctccgctgtgctcatttgcttagtgcagggaatctcagtcctggctgcatgttagaatcaccagaggagcttcagacggcaatcctacgcctggacccaccacaaagattttgatttaattggtctgtgggcctgggtgttttttgtttgtttgtttgtttgtttgtttttttaagtgtcccagattagtgtaattcgtatgagggttgagagccttagtgagaatctctgggatagtaactaggctctgaaaacagtggctagttcagaaaatggctggagttaattaaacgagaaaaagaaggttttaaaaggggacatttaaaaggggacaatgccagacacagtggctgacacctgtaatcctaacactttgggaggcagagcaggaggatcgcttgaggccaggagtacaagaccagcctgggcactatagcaagaccctgactctatcaaaaaaaatttataaaaaataaattaaatacattataaaaaggggggcctacagtctgaccatcctacagtctgaccttacagtctgaccaccctaatgtgctaagggagtcatttgaaacagccaaactcattagaaaatacagttttatttgttctcccaccagtaggctgagtggtgggagaagagtttatgtgtggcaaagccatcttaggccactctatagaggagtccactttgatatagctaatttattcccaggtctctctttcctgttccaaaccaacatttaatgctggtactgtatttttacagtactttattgaggaaaaatttacataccaaaatgcatacatcttgagtgtacagctaggatgaatttttatcatgcggccaccacccatatgaagatttagttatagaaatagttgccttgtgcccctttctagttgataacctggccagcgttaacctctcctctgataagaaattcactgtcatttgtcttggctttcatagacaaggtattgttttctctggttgtttcaaggttttttcgttctctttagttttcacaagtttaattatgatgcatcttggagcagatttctttgggtttatcctgtttgagatatgctaaggtttctgaatctgtagtttatgtttcttgcaaaatctgggaagttttcagccattacattttcgagtgcttttccagccccgccttctttttctactcttttcaggactcccatgacatgcaagtggggtcttttgttacagtccgatgtccccgagtttctgttcatttcttttttcagcctagtttttctttgttgaggttatgtaatttctaccttcttgttcaccgattcttttctctgttctctccattctgccattgaggccatcgactgagctttttatttccgttattgtattcttcagttttaaaatgtccctttgggtcttttttatatcttctatttttttgctgagactttctatttctctgttaagactttcaacttttttcatttgtttcaagagtggatgtaaatgcttcactgaagcacttttaaaaccatttttattaaaacaataaaaaacaaaagagatgaagtcttgctatgttgcccaggctggtctcaaactcctcccacctcccaaatgttgggattacagttatgagccatcatatctggcttgttgaagtactttttaaaaaatcacggttgcattaagatctttgttagattattttaacatctctgttattttggcattggaatctattgtctttttttcacattcagtttgagatgttcttgattcttagcatggagagtgattttctattgagacctgattttcatattatatcttaaaactctagatcctttttaaaacttctgttttagttggctttctctgacattgctctggctggggaaagggaaacaccagctcatcctgacagctgaagttataattctagtttccctgcttaacctctgtggactgccagggtgtgtgggtggtttcttgttacctctgagtaggagtgcaagtgtaggctccctgtgtggtctacactgatcctgtggtcagaggaggctcattgcgagttgtcagggatgaaagtcgtggtttcttgcttgtccttctctgaccctaacctaccctggcaggggcattggagtgttttgttgtagtaagagtggaagcccagacttttcatttggactttactgatgtgggtggagtatgctcacaggttttttttttatggtgtttgatcgaagcaaagtcatttttgtctttaagttttctgtctgctaggatgccccttttctgcttttttggctgcagcggtcaggctcttgccaaggcttttgttttttgtgcctgttggcatttctggattgctagctttttttggctccaagtcagatataggaggcaaaaagaaaagccacagaactcaccactaactcactccttggatcctggggtccttagccagtctgccttttattcatctttctgaatctttttatattttacttatatataatgttcagtgtttttagttgtacttagcagaaaaaatagaaaaatgctggaggtgggagttttatttttcctttatttttgaagcatacttttgctgggtatagaatttaatgttgacagtttttttcctttcaagcatttaaaatatataattctattgttctctggcttccactgtttctaaacagaagtcactcattgttcttattattcccctgaatgcaatatgtgtttttttcttctggctgcttttaagattttctctttatctttgcttttcaacatttggctgtgatatactaggtttcttttttttttttttttttttttttgcagttttattttatttaatttatttattttattttttattttattttttattttttttaagttttattattattattattttttacatttattattattattattatttttattatactttaagttttagggtacatgtgcacattgtgcaggttagttacatatgtatacatgtgccatgctggtgcgctgcacccactaactcatcatctagcattaggtatatctcccaatgctatccctccccactccccccaccccaccacagtccccagagtgtgatattctccttcctgtgtccttgtgatctcattgttcaattcccacctatgagtgagaatatgcaatgtttggttttttgttcttgcgatagtttactgagaatgatgatttccaatttcatccatgtccctacaaaggacatgaactcatcattttttatggctgcatagtattccatggtgtatatgtgccacattttcttaatccagtctatcattgttggacatttgggttggttccaagtctttgctattgtgaataatgccgcaataaacatacgtgtgcatgtgtctttatagcagcatgatttatagtcattcgggtatatacccagtaatgggatggctgggtcaaatggtatttctagttctagatccctgaggaatcgccacactgacttccacaatggttgaactagtttacagtcccaccaacagtgtaaaagtgttcctatttctccacatcctctccagcacctgttgtttcctgtctttttaatgattgccattctaactggtgtgagatggtatctcattgtggttttgatttgcatttctctgatggccagtgatgatgagcattttttcatgtgttttttggctgcataaatgtcttcttttgagaagtgtctgttcatgtccttcgcccactttttgatggggttgtttgtttttttcttgtaaatttgtttgagttcattgtagattctggatattagccctttgtcagatgagtaggttgcgaaaattttctcccattttgtaggttgcctgttcactctgatggtagtttcttttgctgtgcagaagctctttagtttaattagatcccatttgtcaattttgtcttttgttgccattgcttttggtgttttggacatgaagtccttgcccatgcctatgtcctgaatggtattgcctaggttttcttctagggtttttatggttttaggtctaacatttaaatctttaatccatcttgaattgatttttgcataaggtgtaaggaagggatccagtttcagctttctccatatggctagccagttttcccagcaccatttattaaatagggaatcctttccccattgcttgtttttctcaggtttgtcaaagatcagatagttgtagatatgcggtgttatttctgagggctctgttctgttccattgatctatatctctgttttggtaccagtaccatgctgttttggttactgtagccttgtagtatagtttgaagtcaggtagtgtgatgcctccagctttgttcttttggcttaggattgacttggtgatgcgggctcttttttggttccatatgaactttaaagtagttttttccaattctgtgaagaaagtcattggtagctttatggggatggcattgaatctgtaaattaccttgggcattatggccattttcatgatattgattcttcctacccatgagcatggaatgtttttccatttgtttgtatcctcttttatttccttgagcagtggtttgtagttctccttgaagaggtcgttcacatcccttgtaagttggattcctaggtattttattctctttgaagcaattgtgaatgggagttcactcatgatttggctctctgtttgtctgttgttggtgtataagaatgcttgtgatttttgtacattgattttgtatcctgagactttgctgaagttgcttatcagcttaaggagattttgggctgagacaatggggttttctagacatacaatcatgtcgtctgcaaacagggacaatttgacttcctcttttcctaattgaataccctttatttccttctcctgcctaattgccctggccagaacttccaacactatgttgaataggagtggtgagagagggcatccctgtcttgtgccagttttcaaagggaatgcttccagtttttgcccattcagtatgatattggctgtgggtttgtcatagacagctcttattattttgaaatacatcccatcaatacctaatttattgagagtttttagcatgaagggttgttgaattttgtcaaaggctttttctgcatctgttgagataatcatgtggtttttgtctttggctctgtttatatgctggattacatttattgatttgcgtatattgaaccagccttgcatcccagggatgaagcccacttgatcatggtgcataagctttttgatgtgctgctggatttgttttgccagtattttattgaggatttttgcatcaattcccttgttctgcatagagtttgtagagcctcctgaatctggaggttgataattttaatcacttttggaaaattcttggctatcattcaaacatttcaaacatgaattgggactccaactatacattggatattgtcccagaggtctctgatgcttttttctttgcttcccctatattacttttttctctctatgcttcagtttggataacttctactaacctgtcttcaagtttattaatcatttcttctttttctttttcttttctcttttttgagacagagtcttgctctgttgtccaggctggagtgcagtggtgcaatcttggctcactgcaacctccacctcccaggttcaagcgattctcatgcctcaggcttctgagtggagtagctaggattagaggcatgtgccaccatgcccaactaatttttgtaattttagtagagacaggtttcaccatgttggccaggctggttttgaactcctgacctcaagtgatcctcccacctcggcctcccaaagtgctggcattatacatgtgagccaccacacctggacaatcatttcttctgatatgtccagtctgttgttaaggctatccagtgatttcttcaattcagatattttatttttcagttggttttttcttggtttccgtttatctgtggaaattctccatcttttcacccaatttattgatagtgtcctctagtttatttatcatatgaataataattactttaaatatattttctgtgtattctaacatcttgatcatctgtgagactacttacttgtgttaactactttttcttctggttacgagtcacattatacgtaatagaataatagagtctgaagtagatactattttcccctaaaagagattgttctttccaccatcaggtagctagggcaaggattggtttcctttatctacttagaagttgagctggtttggggcttatttgttgcttaatttgctaaagcacccctagttttaaacatcttgatagtaatcaagtccctccctgtggcagagctttggaatataaatactgacatacctcatagatattgcaagtttggttccagactactgcaataaagtgaatatcacggaactgtaataagtagatattcatcataagtggtttgaaacactttcttcattttctatttacggtaacattaagaatcggaatttaacagcagtgccttctcaacactctatgggtgagatctctctccttgaactgtttccaagacccacacagacctggagagcagcctagttccagttccttttatgaggtgcacacagaagagggcgagtccaccatcaggctctgccattgctgctgcttcttcatgtaacctgcctgttttatatctggttggttggcaatgatgtcatccaattacagcctttctgttctccttttgggtaccgagagttggtatgtctagattctctaacagagactttacaaataaacaagttcacaatagaaagattatagaactcacaggcatccattgacttcccttttgtaattggtgtgaattaacaggttttttggtcttctagagaatctttaccaagtccacaaagggtagaagtattgtcatatggcagagagccaaggcttcatcaaaagctcctgtattgtgattaactaagtgttgtctcgattctaactagacttaaattccttgaaggcagggactgtgtttagttccctcttatattccctgtgcttggcccagaacagggactcagtaaatatttattaagtgaattgggaagaggctaattttactttctaggaatagcaatgcatatgaaatacaggtaccaacagttttgtaaaacacataaagtgaaaggcccagactgagagagcagctaaaggaatggaccaagaggcttatgcatcccgcaagaattattgtgcatggagattattgtgcatggattttctgacttgaggaactaattctatgcacagacatatttcaaaaaagataaaactgccaagataatgactggtacattatggagacattttctaagccattatatgtttctaggaaattatctatagtaactagagaaccagacatgaatctgcactaatttggccaaaaagcaggaaatatcgaggacaccgtgttatcctgggagaaatcttgagtgtctgtttactaaaatagttttgaatgtattagatgctctggatgaaaccaaaaggctaagtgggataaatatgtgaaggcctaaattcctccttaaaatggaatcaagaatgatacagccagagagagtgtgttatggtcttaacaaggcagctgctgacttcattgcccctttgcagatgttgtcagccctgggtgcacgccgactggggaggggagtataggtgattacaaagctttaagctattcatttttttcctgttttgtgctgtaatatttattttattcattattattttattttattttagattcaaggggtacatgggcatgtttgttacatgggtatattgcataatgttggggattggtcatctaagttacccatattatttttactttactgacattattttatacataaaagattcaatagaagaaacttattgctctctgaatttcccaagaaattattatttattttattttatgattattaccaaaataattctgttatagaggaggggggtattataaaataatttgtcccaggtgtcaaatatgctaagcacgccccctatcagaggccatggaatttctgcccaagttgtgagaaaatggtgaaaaggagggctatttctccgaagagagatgagaacttttgcagttcggtgcgtctctggtagttaaggttaagtccatcacgttagaagattttatcttccccaggtaataatgtgtgtgtgtgtgtgtactcagatggttgatggccaatatcacaaaaaggtgtggtcttcaagatgatgaagagttgtgctgtttattttttaagggtataacacaaaaaggaaaaatgagtaagtgaataaataaaatgactgaacagtcactgtgaattctgggagctcttcagcgttgtaagccgggttgtgtcaccatatgactctctctgcctcaagagggagctattttcagagttcagtccaggcaggaagcgagtccacccacgaaggcaccaccctgtcacctgagtacgtggaaggcaatcacgggcaagagtcattgtcagcactgagtcctcatgttagagagacggagggcggcaacatcacagacacggccgccgtgtagcacagggggctgcggaaagcaaaaccttttgcaactgccggtgaataaaaacctaatacaagtgatggtcgagatgtgtctttgctagttaacgtatgtctcaagagcaacaggaatccccaccattctagcaattacttttccttgtgagtataactgaaaaatttaagtgactcttacaaaaatgacttactgctcacccaatgagcaatttttattttacactggctataaaatgtcctgaagccattttacaaattgcctttattgttattatatagaatgcatagtggagtctattagattatagatgccaaatgtgacattccaccctgaaatgtttaattctctgataagaaccattactttctgagacatcttcactttttcttcatttttatcatcagcaccagcagctgattttctttttgggagccactttgcacacagaaacgaaatttcagttacttcataaaacttatggtgtacatggcaacaaggagagaatgaccgattcatgtcgaaatgcagatttgggaatccaagcaggtttactcactagttaagttgataacttggctcagaccactgatcttgtagaatataggattgaaatttgtgcctcaaaaaacaaaacaaaacaaactgcaaaatagtagatgccctaggccttcagtgccattcaagcgtggtcaaaactataagtgttaaacccaaaagggcttgcagtttgacaagtcttctggaacttaaaaattgtatgttgaatggctgcaaaggcagaggataagtcaaaagtagcatttgctaagagcaacctaactataaacaaaaggatttaggacagataagaacacttgtgagtgtgctggtggggagtcaccaggtttgtacggtgtgggaaatgggtgactcaggacgagaatcccccacacattctctgttgtttgttgtgtattgacaagcagagtaatccagatggtgtccttaccatggagaaggaaggttgttgacattcttaaggaattattttgttgccttcataaagtttcaaggttacagaatgttggtcaaaagtacaaagtttcggttaggaggaataagttctattgcatggcatgggaactatagttagcaataatgtattctcagaacgtaaagtaaaatttaaaaaaaatatattttaaaattgcttaaaaagtagattttaaatgtttgcgccagaccaaaaaaatgtgaagtggtagatatgttaattagcttgatttaatctttccacaatgtatatatatatatatatcaaaacattgcattgttccccatagatatatacaattattatttgtcagttaaaaataacatttaaaaaagaatgtctttaggtattctatgcggatagccaaactggatgaatctgaaataattgttatggccaatattctgatccatatcaggagcaagtaagagggtcctcctctttttgcagaatttggcttcagggaggttttgtttttcctttcctctctgggaggcctacctattacatacaccctcccagcggcatgtagggtggaaacactgagaataagttctatttgcgtacttgtttgacttgcttcaagaaattaaaatatctggggatctaaagttacactgcagctcagagattatttatataacaacaggttcctttaaaaatcatcactcagtgtacttaaataagtttggggccaggtgcggtggctcacgcctgtatccccagcgctttgggaggcaaaaataggaggattgcttgagccaaggagtttgagaccagcctgggaaacatggtgagacctctgtctctacaaaaattaaaaaaaaaaaaattagctgggcatggtggcacatgcctgcagtcccagctactcgggaggttgaggtcagaggatcgcttgagcccaggaggctgaggttagagtgagctatgatggcgtcactgcacttcagcctggttgagagagtgagactctgtctctaaaaaaaaagttttggcttatgaaaaatcaatttttgaacatctttgcagtggccaacgttgcttgtagggtctagcacatgtttactcaatgcctttctcttgcctggaatcctaggctgctgctctctgtcctcgttgtgttccacatgggattaggccctccatcaaccctgatgacagtgatgccagctgcctcctcagtgactctttcccccacagtctggtatggctcaggatcctcaatttccccctcgctcttcaagaatgaaacctcatgtgctctgtgaacattttcctcctccgtgccctggtacccagggaaccactctgggcactgctttctgcacctatctgctgcatctgtcctgcatttgggtagaacctctagactcgattttgttctgtcttctctgcctgctttcttagacctgatgattcagaaggttccttgcttctgaatgctctttgtctttgcacatgctaggctctgaatgtttgtgtctcccaccaaattcatacgttattagcccccagtgtgatggaattaggaggtgaattaggacatgaggatggaattaggtcatgagggtggagtcctcatgaatggggttagtgcccttataaaagagggcccagatggctgggcgtggtggctcacgcctgtaatcccaggactttgggagaccgaggtggggtgtatcacctgaagtcaggagtttgagaccagcctggccaacaagtgaaactccatctctactaaaaatacaaaaagtagccagacgtggaggcacacacctgtaatccgagctacttgggaagctgaggcgggagaatcgcttgaatcaagaggaagaggtagatgttgcagtaagccgagattgaaccattgcactccagcctgggcaacagagtgagactctgtctcaaaaaaaaaaaaaaaaaaagtgcccaaagaagtcccttgccccttcttccatgtgaggacacagcaggaaaacagctgtccatgaactagtaagcaggccctcaccagacactgaatttgcttgcccttggacctctcagcctccagaactgtgaggaatacatttctgtggtttataagccacccggtccgtggcgttttgttatagcagcccgaatggactaagatggtacagttttccatttccttgtgctatccatttcaccatgtggatctgccttaccgtcacacccacttggcatgctcctgaaatccagcctgggtggagcccccactcatctgggagggagcttagagaccctaagtggccctccagatatttgtggtttccagttacattgacactcccctggggtggggccaggaccatgcaagagcacacggttgagggaagcaatgcagcggctgctcgcctgaattctcaggagcactggccagacccccggcagcacacacctcactctcatttccaaatgtggacactgctggaaacattagcatgagtggaattctgcaccagggagggacatccattctcatttcattcacatacttagatattagttgtaagtaagtcttggtacaatgtcagcttctcaaattgggagtaagagaatctactacctattgtatagagtgtgtgtttgcttgtgtgtgtatgtgtgtgtgtgcacgtgtatatgtattctggagttttccttttcacatcagcgatttcagatttgaagaccataatggaatctgatcttcttggctgttagggggctttggaaggctcctgagagcagagattggtgttttctgagttgatggctaacaggctgtggaagatcgtcaattagagactgagttggcctgccacgctgattaccctttagacttcatttcaggtgaggtgaaaggcaagccatgctgtcctcaggccagtagaattcgaccgcttttaattcagctatgttttggaacagggagctgctaaaaagactttgcttcctttgaatatcagttgatacagaaactaaaaaggaaaaaatagcttcacttgagatccaacaccctcaatctagtcaagggaaacagttaataactgaataaattagtaaattgtatagtgagctagatggcactgagtgttatgacagaaaaataagcagaggtttggggagtgcttgggaagggtgagatataaaatagggtggtcagagcaagccacatttaagtctttggaaaaagagaatggtgagccatgtggctatctggggaaaggtgttctggagagagggccctgccagtgcaaaggcccttaggtgggagcatgtctggatttggggaacagcaaaaacagtggctggggcataaggagtgaagggggtaggacataaggtcagaaacttaatgttggggagggactcattgaataagatgggcaatccattggagggtttgagcagaggagtgcaacacccaggagaagctgaatgtgacacatggatttccgttcaggcctttgactactctggactttgcctcctagacacatcagtttgggggatagaactaagatcatcatttagcaataatgaaactatatttctctggttctgtcctgatgtgctttgtcagaattccagcccatcctaaaaggtattgcaacgagttcaggaagactacggcatcttcaagtgttcacttacccagccctctgagctatcatgttctgctgttttcctttctgcctgctctggttgctacaagggagtttcctctggatcttgacatttcaatgttctcttgtcctctcataaatctccattccaggttatgctggtctggctcactgtatcagtcatggttcatagttgaaagtaatgaaacctaccctagttaatttaagcagaaaaggaatttgttaaaggataccaggttgtttaaagaatcatagaagagatcagagaatcaggctttgagcaacacagctagaaacaaaacccaactacatgggctgactgctcacttctcctgctgtgtaggggcagtgtggctcatgatgccaatgctgggcctggcacgctgactgctaagacctttgccattgctgcctttgagggccagctgtagccctgccatgctttcccattctgccagaagggctcccatatggtgcctccttcttcacgtcacttctcttcatactgaagcctgtgctccatgccctggctgcaaagaagactggggaagcaagaatctgacttgaggagaaagtagtactctagtggaaactttcctaaactcaggaaggctattcacacagttctggataccagaaattatgaaaaacctccttggtactcactgttcaggctgttgggcctgttctgtgcttcaacaatggctttgaaatggagatgatgcctttcacccctcattaacgtgttaggctcccatcttcttacatagatttattattgtaattttaaaaattactagatggaggaaaaagagcctacaaagaagtcctactctttagaagagtatttttatttttgttgaagaagtacatgcccgtaatttaaaaaagtcaagtagtgctaaaatacttatttaaaaaatacccagctttcccccgcttaacagccttcctccatctttccagaagtagtcacttttagcttttaatcttttttcttgtgatatttaccctgatatttctaactaatacagacatgctgctctctcttcattaatcacttctagacagtgtttattatggggagatgagactttcaaatctctattaccacttgatatctcccaccctcccaatataattagaagactacataaccatagtaaagtccatatttactgttcttagcatattgtttgatcttacttattctggctaagagtatattattttacttccttcttgaacaacttatttttccaaaaattgataagtatctcatttatttttacttttattttctggaatcttgggctaaatctttccatatcttgccacagttctataaaattccactcaattcaattttctacatgtgttacaggaccaacacctttatatgcgtgctatacagtaacagaccaatacgctgagacagcagggtttgaagcagagagtttagtgatttcagggtgtcaagtgaggagatggtaggagaccctcaaatccatttgtccaaggaattctgggctggggcttttaaggggattatggaaggtgaggggttggaaaatcagtgtcattgatttgttggggtaaagggaatgaaatcatcaggatgtggaaactacactcttttgggtgagtcagcttctcatggggtccttcagaccagctgatgtcagtaatttcactgatacacaggacatgaaagaatatctcaagtggaaaaattatcattttataatgtttaagttgttatctatagagtagttcatgggtactataatctttttttaaattattatactttaagttctgagatacaagtgcagaacatgcaggtttgttacataggtatacacgtgccatggtggtttgctgcacccatcaacccgtcatctacgttaggtatttctcctaatggtatccctcccctaaccccccactccctgacaggccccggtgtgtgatgttccgcttcctgagtccatgtgttctcattgttcaactcccacttatgagtgagaacatgtggtgtttggttttctgtcattggaactataatcttgcaacaggttctgaagctatagcagtgattctgaagcaacaggcaccaaaaagactatgagaaagcagatcaaagagcaagctgacctaatgattaatgctgaatgtgctgcaagcctggtttattttagtgtctcttcctatccttccctgatgaattttataaagtttataggggtaatttcttatgtacctgccagacaatgttaaaatcatttaacattttaacctttcttagaggctaacttctcctagagcctttcttcccttgcttcagtcacaaagagttgttccctgaatggcttccctgatgtcatcctgggtattccttctgcctttctcctatcttgaatctcctatttcctggatgcaatgtactctttttttttttttcttgtttaactccatcattttagtggagcccatttcctgtagttttctgagaaatggaagtatgacagatatattttatattttataagattctatcctttttgttctactttaaaaattgattgattgtttaaatgggtatagaattttatgttggaaactatttttctcagagtgtgtaaggtgttactctaccttcttctagcttccgatattgctttttaaaaatctgatgctattctcattcttcattttttttgtgacttgttttttttctggaaacttttaagatcttttgaaatctttttatccataatgttctgaaatttcacaaatgatgtgcttttattcattcagtatgttacatacttggtgtgctctttcaatgtgaatagttgttcaaatggaaaattttctttatggtatttctttgataactttcttttcttttcttcttttaagagacaggatctcactctgttgcccaggctggagtggggtggtgcaattatagctcatgtaaccttgcattcttgggctcaaacaagcctcctgcctcagcttcctgaatagctaggactacaggcatgtgccaccacacccagctaatttaatttttttttggtagaatgagatcttactatgttgcccaagctggtctcaaacttttctactcaagttatcctcccacatgaccctcctaaagtgctgggattgcagccatgtgccacccactctgctgagccccatgttttttctgtttttggaattcctatgaggcagatattgtccacttggattgattctccgtttccctcagttttcctctcctaatgtccacctgtatctttttgttcaataatttaaaaaatgtggatataatatgtaaatttctaagagcttattcatattctctgactgttttctttaggaagatagtagcctatctttcttcatcctctaaagtcgttggttatcattaattataattttcttaacattttctcttgcttcttatcttgtctctgttctcccccctgttctttttatcctgtttgttttagcctctgtctttcaagttgacagctgcccccaaagcctggtgcctattcatatctaagaatgaggcactaaaaaactgattagacttgagctggtcttgtttacttacagagtttcaagtaggaaaatttgttggctagccagattgcctcaaatgtcattatttataggttttcctttcaatcctccaccctcagggtgttttattttttaaaatcttcttggagaatggaaggctaaatgataatgttctgaagctggaactgtgaaaataattggagtctcacatttcaggatacagtattcagttaattctctctggtttgagtgtgattcacacgccctcctctgggcctggtgtccctgaggtgaggcaaatctggttcaactcatgtagagaatctgtatcacatctcctgatgggatgttgaggggataatttctttatagcatacagtgatggttctactcttgcctcctaggtacctggtgactccagttccttagtttttcttggattctttagggtacgttagccctcttctctctgttaaggccctctaaagacacttcagtgttagttcagtctgccctgctgagccatttactattcttctatttgctttctggattcatctcatgtgcttctgggttacagatgtcacctagtcttatatgaaaatggaatttgtgttcctttttcttgttctctttgttttgtagtaggaggctccttttatgaacacaaggacattatatgttagaaaaagagcgtgtgacttacctagatttatccccaaaatgcccctcagaaccaaggtgaccatacaacttctagaacacttcagaaataagctggaagagggaacagggttacctgctgagacaacaggtacaaactgggagtgtcctgggagaactgggatatatgatcactctgcatagatctcaaactttctttcaatttatatagtaccaactgaataatatataatttttttcaaaaaaataaagctctgtcttttaaaaattatttttaatgcagtgtcctttatcttggattctggcacacatccacagggactagactagacaatgaactgaaagatggacattatgctatactcaaagttgcccctcccttcctggccctctattctgtttggttcaaactttccccttcaactcttttttcccctgggatggattatttcctaggggtctccttagtgcctcatgcaaactgatccttggaaggcctgcaccaccagccttccactcatgcccagatgtgtttgaattataatgaatacagcttaggctttaagtctggacctctgtgagtgaatgtggtcatgcctgtactccttccttggggtttgcaggaaaacagggattgcaacaagttgaattcagaagtcctcttgggaagtttataccaggcaagagacacaagctgcaactccaccaccattcctgctgctccctgctccctgcttccccaggtctttatcttgagaccttggagcttctcttccactttttgcttgcaagcccttttctctgtcccttaatttactacagttcaatttatttcaccaaaaatacattggtgcctactgcatgtcagacactggatgagtcctgaaggcaaggcatccttgctattaaggatcttatagcctaggtgtgcctaggcataagagggtcaatatttttgaaaggtcttccttagaggtgattttctttcatataggaataggaggaaggaatcccttctggtatggggagaaagaactgggagtagagaggagaatcaaagggtggtggaagcatctggggaggttggtaggggaaaacccagtggcagggaacttcatatttcttaagccgtagactaagaaaatttcaaggccttgggagatgctccagtttcacgatggtgtctgatattacagtggttgaggccggatgtagattagacatggctgagggaagtttccatgaagctgggcctgagagagttctccagtgcctcagggtccatgaacaatgtccagggagtgagaggctccctagagcctcagtgagggctgtgcacgtgctagagaggcaaggagctgaggaggcctcatgttggaacagaaaggccatagagggtagggaatcataatgagaggccttggctgggaatacactcttatctgggagtcctttttctttaatgcttccttcagtctaatctattactgtttgcagccttaaaatagtaggattttacaatccttagaggcccccgactcaatctctgtttctctctcttcctccctcttccttcttattaagaggagaaaaaaaatttgagcttttcttcaacttcttttctagagctacagcctcaattggcacatgctgtggcttccaagttatgccaggtgacaagtgtaatgttttgccatgaaatatcgtaggtctccatctttccactctgagaacagtttcctctctgcctgccacctgagtgctaagccaatgctgtgtttagtttttattatgtcagtattcctcttcaagttaccaacttctgtattaaatagaatgtcagctgttataacaataatcccccaagtcgtagtggcttctcacagtaggaattgtttccccatgtgaagtgcaaatgtgttttcctgatcatcaggcagttgtcccacaggcaaagattcagggacccagagagtcattccactcagatcctcctgcatttagccagaaaatgaagaaagactatgggtggtcatgcctaggaggtgtctatggaccagccctgaaagtggcactaatatttctgttcatatgttattggctggaagagaaaatgggtttggtgaagagtgagccagtctttgccaagcatctttatttaactgccatgtgcatatgctttaatagtgtgacataccctagatccttttggaaacaggcatgtaaaaaattaattttaaaagacacataatttgcctctcttcttccagaatttttcttctataaaatgtaaggcagggaatgattatttaatggtctgctctcagtttgagaagcccaggaatatggaaggacacttgtggtcctttcctgcctgtgagttgggtccctgccattggtaatggtcagaccacaagagcctcctgagtacctaattccagtttagagattttctccagcataaactttcttcttcgtttttaaatggcctcattcttctgagtttccctcatcactgaccaacctttcatctagcttggtttggactcacgggtgaggctttggtttgtatacttttatgattcagcactggttttaaatcttgtgtttttttttttttttgtaattgtaatttctttttcgactcacaagtcacacctggttagcactgttcctctgccccaactggtccagggtaggagattttaaaggccctggagctccaagatgacctctctggggcattgcccttggcaggttgaggactctgggaggattgtggacagtgagatctttgttcttggcttgtgttctcattccaccccacaccctgggcccctcctggcctgtcctctcccttggcctggctgcccttgcagcaagcagggagtacccaactgcctcctgatgggccatctgtaggcacatttgctttctggcaaatttctttgcataagcagcttttaagtgtgatttgtgtgacccgtccaggtttctgattttcaaatcacatcctgaatatttactgtacctctttggctcactattttctgcaaaattggaaccctttccctctctgccaatatactcttttgagccttttacataataaaaggcttgagtttcagcattaatcattgtgattaatgtgattccactaataacctttttctacttgggaaggctccaattatggctatattttgtgtctggccttgggccagcttctaacccaatgatccaggtttttatcagcttcatgattcctcagcatggacattaacctctcctgtatccactttctcctacagatttcaggcagagctaatcctccaaaccttctgctgacccacccttgaataaaataaggctggcttcctggggagggaaggtctgcctctctctctctgtatgcttgggcacaagcctattcagggattcttgatggtttccccaaaggtgatgtcaaaccacatccaggcttcataattctttggcttaccactcacccttataattaataatggaaacttgccaggaactttttttcttaagaccgtttttcaaggagaacattcaaaggactctttggcttaaactgttcacaagctctggactcccttctttcagacacagtagaggaaataggctggctctccaaagaggtaatatgagataaggagaattacgtggtctttgagatcagacagcattagttgtgtgaccttgataaaattatgtaacttctatgagtctccatttcctcatttgtgaaatgggagtatgattatctatcttgcatggttgggatgaggattaaatggagtggtgcatctaatgtaactgctggttccatttccactaagataggagtctaagtagtctgaaaaccttcctactagaaaatacctagaaatgttcaatagaatgtaatgaacttccttttattttttcaccaatagattttattcttgctttttacatctattctcattcatactgatatggaaaaaagactgttcaatagtcacacattataggtaaattcaaatgtacattataacacactgagcaactatgacataagatgtttagttgttttataccaacagaggctcactagtagttttcagaaaggattagtttcccaatgtttattcataaacattagaaattgtcataagtgataacaaaatttaacctgaacaaacatcttttcaactgcctagaaccagagggagctgaagactagggctgatagtcatgcagtctcagaggggccagagtttattgttgctggtaaataatggacttggatttttttttttggctgagtatcgttttattttattttaaaaatagttttagattcaagggatatgtgtgcaggtttgttacatggatattttgcgtaatagtgaagtttgggctctagtgtacccattacccaaatagtgaacattgtacccaataggccattttaaaatatttttctgtatttttttgagacagggtctcactctgttgcccaggctggagtacaatggtgtgatcatggctgactgcagcctcgacctcctgtgctcaagtgatcctcctacctcagcctcctgtgtagctggtactacaggcatgcaccaccaagcccagctaatttttgtattttttgtagagatgtggtttcaccatgtttcccaggatggtctcaaactcttgggctaaagtgggagttgagctcaagaaggctcaatcttcctgccttggcctcccaaaatgctaggattacagatgtgagcctctgtgcccagcccaataggtaatttttaaaacccttaccctcctcccatccctccccgttttggagtcctcagtgtctattatttccatctttatgtctgtgagtttagctcttacttataagtcaaaacatgcagtatttgattttctgtttctgagttatttcatttaggataatggcctccaactctatctatgatgctgaaaagaacattatttcattcttttttgtggctgcatatattccatggtgtgtatatcccatattttctttatctgatcatctgctgatggacacttaggttgattccatgacgtagctattgtgaatagtgctgtgataaacatgagtgcaggcatctttttttttttttccatttgagagcaggtactgtttgttaaccaaccagcttagaaaaataatcatggtagacaccttagttcagtcttctagtaagcctgttgatctggtcctccctgttgccagcatctccacttctacaaaatgggtggtttttttcttcattctgccttgtggagaagataatttgaagggccacaggaagttatttgcttctttgaagcattttccaacagtatagatctcatgaataagatcctccatgcagttgatgctatatttaccaagagatcgagcaatcaaagtgttatctgtcgaagcaactcccttcttattgattttgccataaccacgcttgtaaattagttcatttactgacttcagatttgggcacccccatgcaatgtatggctctacaatcctcagcatgttaattgaagccttgttgagcttcacaaaggtttcattgaagatttgacaaaggcgaagaagctgcaacacctttcggatctttgggcttacaccattgacacctctgatcctgatgacaaacgccaatttgggttttgcaggtacatagaagttgccagcttttcttgctatccttggcatttgaatttcagttctgtacaactgcctatattccttgtgatagtgctttgctttttcatagataagcttcctccttgccttttgaagcatcttttgggcaaacttctttctcaggtgcttgatcttcggctctgcgaaattccttctctttttcttaagggtttctggcacagcaggaaccttcttcttcttctcttctacaccctccatggttctagcctgaaaaagagtggtatctttttaatataataatttcttttcctttgggtagatgctcagtattgagattgctgggtcaaatggtaattctatttttagttcttcaagaaatctccatacagtttttcatagaggttgtactaatttactttcccaccaacaatgtataaggcttctggattttaaagctcaaatggatatgggagatgaggtcttgagcccttgagtggcaggaaattggaatggagatcactgaaaaaatctggggcgttgaaaatctacacctttggagaaatggttagatagaaaaaagcccactcactggcagatatactatagtgagatttatctgtcttctcttgagttccgagtggggaataaatttccccttgagaatgcataacaatattcattcacaacatacttttttgcacaagtttgagattctaatttattctacttgcaagatcttgggagccattaagctgaaaaatgaatatggcactggttctaggcaagtgatatccttggaatggccacagaagcaaatacaaaactaccctggagagctggatagacccttaactcaggctgcttggtatttgcacagatagacctctactagaattgaactcaaaaaccaaaattacaaaacgcacaaggaaaccagctgccatatctaagtgccactagacaaaagagacagcaggattggagccccaagagcttccagtaacagagctattagtggagaccatgaaatgagtatactaagaaaatcatcaaggttgtaatagaagaaagtgataatattgggaaaaaatgaagcaggagagccaaagggaccttgaaatgaaaaatgctgtcgttgaaattaaagctcagtgggcagagtaaagagtgaattggccacagtggtgagaacaggactgaacagaaatgcttgcaatcagtagatgctcccaaatttctagcaatctctctttgggaaacattgaggtgttagtttcttgggaggtgaagagggtttagaagcatctatgttcatttttaggtcagcaaatacatttttaaaaaataattgactttattttttagagcagttttgagttcacaggaaaattgagggaaatatacagagggtttccatatccctctatccctacacatgcacaacctctcgcactatggacttgtggcaccagagtggtacatttgttacaattgatgaacctacatggacacatcattatcacttaaaatctacagtttacattaggattcacttttgatgttgtacattatgtgggttttgacaaatacataatgacgtgtatccattagggtatcctacagattagtcttattgccctaaaaatcctctgtgttctgtttattcatccttctcctcccttaactcctggcaaccattgatctttttactgtcttcatagttttgccattttcaaatgtcatatttttggaatcaaaaattttctgatcggcttctttcacttagaaatatttaagcttcctccatgtctgccatagcttgatagctcatttctttctttttttaaattttactttaagttccaggatacatgtgcagaacttgcaggtttgttacataagtgtatgtgtgccatggtggtttactgcacctgtctacccgtcgaaggtccctcagactctttggtaatcttgttctagactgtgcaatttacatgggaaaagggcactttctattcttctatttgctgtactcctttgtggattatttccaacagaggtcagggttttctattattaaatatctaaagagcttaatgggtgatataaagtcatagaagcattccaaagcccaatttatcagctaaccagaggcagctaatggaaatctccatccaccagtaaatttgatgcagtgagaaggtggtaggtggagctgaaagagagaggaagagggtaaaatttatttggcttgaacagggctcacctacaacggtgtaactagtaagacaggttccccgatgcaaagcataattggtccctctttcatgtaaccaatagagcaaccctccttttctagctgggacagtgggtttagctaagaaaggatgaagtttctggatggagggagtgggaagaaagtgaatttttattttttggtggtgtaaatttgccaaagaaaacactatagacctcacagtgttatagatctgagcaaggttacctgtattaccctaagattttcttacctccctctcctccctacttcctccccttttcccatcccacttccagctgttttcctggcagtctgtgtgcagtggtggtggcaagtgttgctactgtctggagacatctgctgaatgtctcacctttgatggatcttcttatctttgacttccacagatgacctcttgccttggacacaggtgtgctggtcacacacagcccaggaaccttgccgaagtggatcatgtacattatcttagaaccaccattgcccttcaacattctctttataggggatagaagaaactgtttttatttcttcaaggcaacatggttcctgaagcaatactgctcttaggttctggatagactgctatagcagtgtttccttgtctaccaggaaaaaagggtggggcacagggtccaggagaggagcataagaaaactttgatatctaccaggtaaggctctacaatcaaagcatagggtttcaggatttttacaatggctgctttaagttctctcattttacagattagaaatgaaagtaaatgacttagttgttcaaggtcacggagctactggcagagccagaacccgatcacaggtcttttgatgggaactcctttgttttaatgatagagcatgtatgacttgcctcttgaaaccctagattcaatgctgcatgatggctgccagaaaaatgccagtccttctgggtgagttgaatagagaggggagatggtaaccactcacccaatatctattttctcttctttattattaacaaaactccagctaaaagatgatgatgcatccactaagaaactacatttaccagttttttgttttgttttgttttgtttttttcagatgggatgaccatgtgacacagttctgggtaatgagatgtaggtgacgttactgggtggaattgatgagaaggttcccttacagcagggaagaaccagctaatatgctatttctctttaaccctcttctttttgcctagaatttggatgacatattagaggtagaataatcttccagtcaccattaggttaagagaattgcaagggtttggcttgagcttgagccaaagctcacacaattctcttagtctaatggtgactggaagacaaaattgtactcagagctgctgaactaatatcagcaactgcctactttctgagttgattaagctactataaattgagctccctattgtttgtcaaacatattcctctcatagagcaaaaaaagtgtgtacatatactttgttccccccatagccttttacattattaagtaatattatttgtgttagtaaactgattattagagagtgagcttgtttacattaccagaggatttttcctattaccaaaagattacagggatcgcacaaaagatctttcagttgcatctttttaagtgtttgtttattgatcatttcatattaacagagaaaaaactaaaagcggagttgtttcatgctattgctcattaagaatcaatcagaaacaacaataaaacaaatctgaaagtataaagatcaaaagaagacattcatgttactagttaatttttttttaaaaaccaggcagaaaactcaaatgttatgtgccctggttcaatgccagacaccggactaccctagtacagtagacttgaatacatttatttctcaacatacgtcattctttctatgaaacctactccaagaattttctccccatttctattaaaagctcctttatcctcctggacatccaacttgaaattgtcattgtcctttctccccccttggcaatattcaatcagtttccaaatcttgggtgggttgggaacatggagaaaaggatccaaaaatggatttatccagttattctctgtaacctcaatttcatatgctctttggtgttaccactcattagctgcttgcatgggaaatataaatttgtatgatggtgacatttgaggcttatgtgattgctttgatctattagttttggagaccaaacaccccaattacagccaacagaacacttttaattgggacacagaggtaaaaggactttctgttgccatagtttcagaggcacatatgtggtcagctgcctaatgctggatttattttcagacataagacatgattgacggtgagctctggtgactcagggacatctgctgttctgataggagtagagtgtggccctgaagctcagctaaaaccaatcttaggcagagcacattctgtaatggtgctgttttcaatgcatttagttttctatccttaggttcacttctgaagaggaaatattaacctacccactaatgaggactttgccaatagaccgttgttctgagtggcagggaaaaaaagaaaagaaaaaaggccagtgggaatttctaaggaagttagtgacttcagcactgggatctagttcctatcattgcagaatctcatggaaatggccaagggtataaaggaaggagaaatctgcataggacgtgagagaagtttacagacacatatgccagaaaccatagcctttctgctaaatatggatctaaagaaggactgattggattcatgacttcttttacacttaaaaccagtgtgtctgggaggtgagcaggagatattttgccagaattcagacatctttccattctgagggatgccagctggaggcaagagtgggcagcagccagtcagagagaattgtctggatcttgcaagaagcccgttaagtgttctatgcctgtgtggtacctacttagactgtacttggcactgatgtttctgccaggcgacacatgggggcactccccggctgactcttgactgccactctagcatggcaaataaatttgtaaacacagagattaaacctctgcagtagtgtcatatagcttcagcttcctccctcgggctgctggatctctgcaattctgcagttaatttaaactgttctctttccccttcatcaaaattacacaggtcacattctttaactataatgctattaataaataaaagtagaaataaaactgctaccacttgaaaatgaaaaacaaaacaaatgcagaacattcacctaaacaattcttaggtcaaggagtaattaagaagtacgcttggactttgggaggccgaggcagggggattgctcaaggccaggagttcgagaccagcctggccaacatggtgaaaccctgtctctactaaaaatacaaaaattagtggggtgtggtggtgcacacctgtaatcccagctacttggaaggctgaggcatgagaattgcttgaacccgggaggtggaggttgtagtgagccgagatcatgccactgcacttcagcctggatgacagagcaagactctgtcttagaaaaaaaaaggtacacttggagtctagttagacaataatggcactgaggatgctagatatccagcgttataggatatgaccaaaattggactcagggaaaatgcatgaccttaaatacctttatttttaaacaaggcataaactgcatacaaaaatttaattcagtaattagaaaaacaaatatgcttaatgtaaagcaaataaagattatacaacagcttaaaaaataaaagaaagtaatataatagaccaggtgctagcaattcaaatcaagcaattcaaatcaaatcaattgagagaaaacataagcacacaacatgaggaattagaaagaggatataacaatagatatttaagggaaggataaaattctactacatgataacaaatttgaaaatatcaaaggaatggatgattttctgagagaatataaatgatcataattgattcaagaagtggaaagtatgaatagcccagtaactggggaaggaaatttaaaagtctgtggtatagatacaaggcttcagctcagctatttcagagatatctgggtttcaaagaagccttttaaaatgttgtgttactagaaattcatgggtaatctattgtatgctttcatttgctggacatgtgcagccaaatggaacagtgttttcctttgtgtcaactgttcacttattcccctgttttccatttattccaaattgccggtggtgtgctggttgcaagataccccaaacactccagagatagaattgtggagtaggatctcatgagtaagagaaaatgatgccactctgaaaagctgagttcttttgattggcaaaagatcaactcatcaagccccctgcctctgcacaaagactgtgaataatcagatctcagttctttaggattttcagtcatgctaattggaagagggtacaatggggggccaggtcagcatctcatacctgtaaccccagcactttgggaggctgaggcaggaggatcacctgagcccaggagtttgagaccagggcatcacaatgaaatcctgtctctacaaaaataaaaataattagttgggcatgatggacccagctacttgggaagctgaggtgggaggattggatgaacccaggagtttgaggttacaagaagttatgattgtgccattgcactccagcctgggcaacatagcaagatcctgtctcaagaaagaaagaaagaaagaaagaaagaaagaaagaaagaaagaaagaaagaaaagaaagaaagaaagaaagaaagaaagaaagaaagaaagaaagaaagaaagagaaaagaaagaaagaaaaatgggagcagtggagagggtgactcagggtatgatgtgaaagctctgattggacctgggcccaacttcttggtcctataggggagggtcccttaacaccttgtcctgcctccatcccctgctgtgcaccatgagtccaggtttgcctgtcaggcattgccaatgaaagtctctgagtcctgtgatgtttatacaccaacccacgtaccccacctcacagtggaagtgaaactggataaactcttaggtgcttgggtcctgggagacttaaagttgaaagtagagtcctctagataactaaaaaaggaggaaagagggaaacttacaagtagtgagattcttcatcgtgagaaggaataggcctgtgtgtaataattctgaatgacaggggctacattttagccctttcctcacctgtttcttcaagatcttgagcaagttgttgggcctgtctaagccttagttttatttgcaaaacaagaatctcctgtaccctgtgacattttctgatttttctgcaagttctgaagacaaggacccttgcctactgttgacaggcgagagttggtgctctgttgttacataaaggcatctattttcctctctggttggttcttagttctggtctcctttccctgctgatggatttcttgtctctctgctggaatcccctcctattaagttccaaacgtactttcctgaaatttctactctgtcaatactacctagtttcaatgaaaagagaaaggttacaaattttatatataaaagtgggtattgaaaaattcctctggtcaactccaggtcagcatccaattcacagcactttatgagagtgattctttcagagagagacttttttttttcagcccatgaagtgactttcacgagctatggggccagctgggatgacagcatgaaaactcttctttgtataaaaagctgatgggggtgagaagaggcagccaggtctgcctgcgtctggctgggtttggagggaggaagaggctggtagtgctgtggtcctatggacactcaggtagggactgccagatgcctggagggaatccacttgctattccctcctgcgttctctttaaatgccagaagacaacaagccttcatgaaatccctcctagctaatggtcatacaaacttcatttcatttcattcatccaataactgttgagtatatactacaagccaggtgaagggcacacagtggggattcgtctgtgtcgggaagcttaattttttttttaattttatttttccataagttattggggtacaggtggtatttggttatatgagtaagttctttagtggagatttgtgagaaccgggtacacccgtcacctgagcagtataaactgcaccatatttgttgtcttttatccctcaccccctcccactcttccccgcaagtctccaaagtccattgtatcattcttacgcctttaggaagcttaatttttacaacaaccgtatgttaaatattattatctctaagacttggattgtttccttgttgcaaagcttatgagaacttgacttctggagtaagatgtgctagtctgggtccttcgagaagcaaacaccaagatgaattaggcatgcaagaattcatcgggaaagatgaatttcctgatgagggaaaatgggaagggagacagagaaggctgggagaggcatcagactatgctgcaggtttggcccctgagagagagagagatggaaggaggccatgtagacaggaaagcaggcaggaaggaaagaaagaagaaatgaatgagggaagaactgcagaatagctttaaggagccacgctgttggagaatctagagccaaattcatccgtgagaagagtctcacatctccccagaacagcacccctgctgtgctctgtcattggcccagggcagcccctgggacatgtggctttatgtgagagcagcagtggatttcagagtgcatcagggctgtgggcctgttatcctcccagcatggaggacctgagaggcactgccacagtgccaatctctgtttcactgaggcaggagaatagggtttggaggcagaaacataagaccgattcatgctgatttcctagaactaaactgaaaggaaaaccccaactttccacacttcagtaacaaaaggatgaggctactccctttgcaaaccacccccttttctgtgcggcagatggaaaattgaaagtacctctgactggttgctttccacagccagactggttggaggccaagtcttcctttgcataggagtgcaactttgtaacttcactttagcctctaattgtttgctttccataaccaattagacatttgcataggagtgtaacctttgtagcttcacttcagcctctgattgcaggccaccacttcatttgcatggggtgtataccaagttgccagtgggaaacctctagtgggtatttggaccccagaagattctttaactggagcccttgagctgccactcggcccgcttccaccctgtggaatgcactttcattttcaataaatctctgctttctttgtttcagtctttccttgcactgtggtctgttttgtccaattctttgttcaaaatgccaggaacccggacaacttgcagtcaagaccctctacagtaacattgacattcactatccaggtgattgtggcaagttaagtaatttctcttagtctcatttccctcatctttaagataattcatctcttaatcatgaaattcaatgaaggaatgaatgagataatgcatctgagaaagatttgtccagtgcttggcaatagtaagctcttgatatatgctaattattactaggttttgttatattgatggttcaagctttaatttgttcaaatgaaatgtttcttagatctaaatatagaaaacaggttagagtggagctttctagttgaatggcagtggaaagccctgtccactgggcctctcctgcgctgctaccctagcccttggggcatctctgaggaaacctgggaattggagaaacataaggaggaatcacatcatacacacatttagtgtaggtgtatttttgaatttttaggttgatggattatttaaaatgaatagttttattttataataatgcttttttaaaattataccttaagttctgggatacatgtatagaacgtgcaggtttgttacataggtatacacgtgccatggtggtttgctgcacccatcaacccatcatctacattaggtatttctcctaatgctatccctccccaagccccccaccccctgacaggccctggtgtgtgatgttccccttcctgtgtccatgtgttctcattgttcaactcccacttgtgagtgagaacatgtggtggttggttttctgttgctgtgttagtttgctgagaatgatggtttccagcttcatccatgtccctgcaaaggacatgaactcatccttttttatgactgcatagtattccatggtgtaaatgtgccacattttctttatccattctatcattgatgggcatttgggttggttccaagtctttgctattgtgaatagtgctgcaataaataaacatctgcatgtgtttttatagtagaatgatttataatcatttgggtatatacccaacaatgggattgcggggtcaaatgggtatctctggttctagatccttgaggagtcaccacactgtcttccacaatggttgaactcatttacactctcatcaacggtgtaaaagtgttcatatttctccaccttctctccatttttgctttttaacttttattaaaattattaaaaaacaatatagactaaaattggctttttgagagtgcacagttctatgagttttgacatatgcatagatttgtttaaccaccacaaccatggaaatacaaaagagattcctccgttacccctttttcattacaccctccccaactcttaacctctggtaagtacttctcttttctccatcactataatttgtctttctgagaatgtccacgagaaggaatcattcagccttttgggactggcctctttcattcagcacaatgcctttgagatccatctaagttgtgtgtatcaatagttggttccctttatccctgagtaatattccaatgtacgggtgtaccacagtgtgcttatccattttcctgctaaataaactttgggttgtttccagtttaaacaatacctggcacatagttgggggcgatcaataaatgggagctggtattatggaggctaagaatgaaagcccacatttcagcaccctctatggggttcttctatgtcttctttctttttaaaccccacggtttggttttctactgcaattattttcctgcttataagtcactgaatggaatgagtcaaaattcatttcctttgggcatcagtggctaaggcagggaggcagctaccagttaatgtcttttctttgtcggtttctcgctctctgtctctccccaaggtcagattccacccctgccccacccaccccaggtgataagcaatggcttcaggactaaagtgtatcattgattgtgactaaatgcacacttagcactgtagcttgattcacttaactttctcttccaggctcttctactttatattcttaagccactcatggacagcatgcccttttatccatcccagctgatatttttcaagcattttagcaactctgacctcattctttatttagcaacttcattatttcagtcccaagctgttaaacattcatcttcactaatatcaacattattaggatttgtttgagtaacgaagacacaatgctatttaaattgcaactggagtctgaggaaagtagagctggttaaattgaagaccttccattctgtcgagccttccaggggtttggtctggctattcaaaggcagtctggagctggagagagcagaaagactttgcctaactgagggagatgaatttagaatttccagggagcaattcaagagggcaagagtcaggaggaataaaggaaggcaaagcatgaaagaagagcctacaggatggcactaggcttggaaccgcatgactaggtagccagtgaaacatccccataggtggattttctctactttcctgtgatacagtattcacacattattatgaggttaatgatgtgaactatcaattaaccacctttccttcccttgggctctaactggttgagactagatacttggattcaaatgtgataaggtcgttctcctaagaacaaggctgtctgatgttcaatttgaaactgtccatagagtccttttctatcccttccatccctggacttcttaataatatcaaatacacacccaaatggcacctgagaatgatttcatcctggaaaacacaagatctctttctcatttctatgtctacaggaagtgggggagagagagaatctatgttggatggagggaagatgaatacaatgacttaattttacgaaagctggagtttggagccagagaggggcacttctctacttgctcccaccatttctccaccaagaacccacctcaagttgggaaagctttatgctctgtgggagatgggataaagggtgttatgggatgaattctgtcctttcaaaatttatatgttgaagttctaactcccactaccttagacaaagccattagagaggtatttaaggttaaacagggtcatagtggtggggctatactccagtaaccctggtgtccttataagaagaaaaagagatgcctggatgcacgtacacagagaaaagtccacgtgaggacacagcgagaagacagatgtctgcaagtctaggggagaggcctcaggagaaaccaaccctgctggcaccttggtcttggacttccagtctccagaactgtgagaaataaatttctgttggttaagccaacaagtctgtggtattttgttttgtttctaggcagccctagaaaattagtaccagggattaggtgatctaatctacatctcgagaggcagggagatctcagctgatgtgtgggatatctttggtaagaaatgatgtctgtggaagcaacctaaatgcctatcactgatagactggataaagaaaatgtggtacatatacaccatggaatactatgcaggcataaaaagaatgagatcatgtcctttggagggacatggatggagctggaagctgttatcctcagcaaactaacacaggaacagataactgaacaccgcatgttctcacttataagtgggaactgaatgatgagaacacatggacgcatgggagggaacaacacacactggggcctgttggggttggcaagggtggagggagggagagcatcaggaggaatagctaatgaatgctgggcttagtacctaggcgatgggatgatctgtgcaataaattaccatggcacacatttactgatgtaacaaacgtgcacatcctgcacatgtatccctgaacttaaaataaaagttgaaagaaaaaaaaccacaaaagcccccaaaacaacacactaccatctaaataaaaaaaatgatgtctgcatcccatcttatacagagcatgacacagaggcagctgaagtataggggcaaagcatcgagatatagagacagaagacctggctacttctgggacagataggtgacagcaaaaacaaacaaacaagacaacaaataataacaaaccaaccaaaaacaacaaaaaacccacaaaacccaaaaaaaccccaagaccaaaaaccaaccaaccaaacaaaaaaatgctgtgtttggattctcgccagcctgtgaccttggacaatgatctctgtgagccccactttcttccagcagcaataggatacttgtgaaaattgtcacaactgctttactggctttgtagacacaaagagagtacacaaaaggtctttattacttggaaagcatgactggcttttcttgcctcatttgtcttttacccaggatctagtggaaccatttggttgttgaaccaggaatagtgaaaagcaaatgacgattgttataaagatgacgaactttagaagtacctctgtcatctcttacagaagaaaaaaaaaagacatctcctgagtgaagaatgaaaagcagaaatcccttttacttctaaaatgtgtcagaagatacactgcgttgtcactaatagagaaaattcagtgttttttctgctttcataaataactatggcttctattggcaaaagcttttgcaaaaagaaatttggaaaaatgtatcaagattcttaaaaatatattcataatctttgacacagtagctccattgataataatttatcttaaggaaataatttaaaatgtagaaagccatatggttaagagatttcctataactttatttactatgatataaatttggaaatatcctaaatatttaaagttaggagaatagctaaataagtcatacatccacacaatggaagataatgtaatcattaaaaaatacataaatgtgtatatttttaaatgagaaaggaagaagacaaaattggaaggaaatacaacaaaatgatagctgtgtggttggtagtagaattatttatttttatttaatgctttatacttctgttgatacacttccatagtgaaactgcattagttttataatcagaaaaaaataaaatatgaagtgaagttcaaatagaaagataagagccaggcatggtggctcatgcctgtaatcccagcactttgggaggccgaggcgggtggatcacttgaggtcaggagttgaagaccagcctggtcaacacaatgaaaccccgtctctactaaaaatacaaaaattagctaggtatggttgtgtgcacctgtagtcccggctaattgggaggctgaagcaggagaattgcttgaatctggaagcagaggttacagtgagctgagatggcaccactgctctccagcctgggtgacagagcgagactctgtctcaaaaaaagaaaaaaaaaaaagaaagaaaagggtgacagtgtataaatactctcctcccctgtgacatagagataattctgcctacccgaatatcacacatgaagtgtgaagttcaagtgaagtattatatggaaacatttgttctcatattcctccttagcccgtaagagaacaaatgatgcttttgcccagccagcagggaagaagtgaaaagagaccctctagttctccttccacccattcattcttcacctctttctaatggaggggcagcgctagcctgactggtgaagcagggaagctattgacatcattagcctagtttatctattggtgggttcgtgtttccttctggccgcttagactcaattggagattcctagccctggcttcacattagaatcagctggagaactttaaaaaaaattgatgcctaggccctacctccagatttcattggtctcaggtaagccctgggcagcagtgttttttaaagctcccaggtgattttagtgtgtagtcatggctgagaattcttcctggattgatggaagcagacactttgcatggctggtcttcagagagtacacataccaggtaggacctgcctcctgcttaaccagccgggtcttggctttttctatttatttatttatttgtatttttatttttttgagatggaatttcacttttgttgcccaggctggagtgcaatggcacaatctcggctcactgcaacctctgcctcctgggttcaagcgattttcctgcctcagcctcccgagtagctgggattgcaggcatgtgccatcacgcctggctacttttgtatttttagtagagatgggggtttttccatgttggtcaggctggtctcgaactcctgacctcaggtgatctgcccaccttggcctcccaaagtgctgggattgcaggcgtgagccaccgcgcccgacacaggtcttggctctttctgttccagcttcttagcctgtgaatgcaggagggggagcaggccagctctttcttaggggctaattctctgcagcttgtaaggcagagagcagaaagcacatttaggacttcattcaaaccgtgttctccaatctagttttatcattaatgaggctgattttattctgagcctcatttgattccattctctaccagttagagcccagaggacagaagcgggagttaattgacagtttctatctccaacaccataataaagtgtgactactgtatcactgagaaaatagaaaaagtagtacaaagctctgcatggggaagcaagtgaaggattagcaagcttggctgcggatggagcatataagtctactaggtccagaaggtaaaggagggaggatatttcagatagagattaatagacataagaaaaaccgaagaccaaagtgtttatttttctattccctctcacatactactcaacacaacatttctgacaccagattcatgggggaggtttcctcacacaccaagcaagcaatttttcagtggacaccagctgggtatcctctatttcaattcaattctgacactacctggagagagtgtcagatcccacaggttgagggctcagtcctgcaagactcctgcctcccaccccaacgtcagatgctaattgcaaactcagggtgtgacctgtgcttctgacccacgtgctataaattgtggtttctatgacccccctccttaggcttgattaagttgccagggcagctcacagaactcagggaatgctttacttatactaagtcattttttataagggatatgacaaagattacagatgagtagccatatggggcaagtcatgtgggaagggctgaggaacttccacagcctctccaccctcttagaacctcaatatgttcagccatccagaagcttccttaacctagtccgtttacttttttttttttttttttttttagtactttaagttctaggttatatgtgcacaacgtacaggtttgttacacaggtatacatgtgccacgttggtttgctgcacccatcaactagacatttacattaggaatttctcctaatgttatccctcccccagcaccccaccccctgacaggcctcggtgtgtaatgttccctgccctgtgtccatgtgttctcattgttcaacccttttacgttttaatggaggattcattacataggcaaaactgatcagatcattggccactggtgatcaactcaaccttcaacccctctttcctccttggaggctgggtgttggctgaacgttacaaacctctaatcacatggttggttcccagctcccatcttgggctacccaggagccccccaagagtcacctcattagaacaaaagaggctcctatcacctaggaaaacccaagggatttaggagctctgtgtcatacactcctatcactcaagctattacaagggttttaggagctctgtgccaagaagcagggatgaagaccaaatatatagctctgattttaagttataatgtcacagagagaaagtgtggagatataaaaatccttagtgtcctgagttcagcagtaagtcttgtgattgaaagacacagagaacgtttggggaatgtcacatgagactagaaatgtatattggggtctggagtgccatgctaatgagtctgaattctgtcctgaagaaactttatagccatgagaaaaaacctatgcatagtcatatctatagttcagtggccaatgttcgatgtgggttttaaacctgtttgctgtgtgaaccccaggtgggactggaactagtgtttttcatgcgggatgtctacttgaaaattctctttcatctcttagcctctttcttccctatgtttttttctgcagcaatttgagaagtaaatgagccatcacaagcagagtttcttgcaaggctggctccaggcaaacctgttaagtggacgtttctggtggcaccttcagttttctccagcctcgtcacacctggtgggctccttccactccttcatgcagacactgctgtccccctccatcaacaccttccttcagggaaggagctggatctcatcttcactgggacaatggctgggtaacagctgatagccttgctgctttctgctgaatatgttttttttttcaaaagaccaaaaagaaaaaaaaaaaaggactaaaccccttaaggtgggtaagtgaaggccaggcattagtcattagccagtagtaaaggaagtgttattcaggcaggaagacactaccactgtccctgaggctgctgtctatactgctgatggttgcgtagtcccctcttaaggacgtggggaggcaggtgtatatgtacctgtaagtgcacacctgtccatcagcactgcttcgagtcagagaactcttgttgaatacaaggtttatctgcccacagtgggctcgtgagtttgtggtggtgtttcagaactgctgaagaatcatgagtgaggagtccaagggaattcacttcctccccttttttttcttgactgggcaaagtttctttaaactgtcacatatgaagcaagcactctgtagaagagaagcttcaacacaaagtgccttttgcagtcttgttttagaaacacattcttatagctgctcctcatgcataattccattttgctgtcaacccttacgacttcaacaaaaactaggatgtgtggagcacctactaagttctgagaaatgtgccacgtgctgaggatacaaaggtgaataatctttacacaattcctgtcctcaaggtgatctcagtgtagtggaagagatagacacattaaaggttaaatgcattactgagagatctagcacaggcccaggaacatagagaaagggcatctttcaaaagtccacgcttttggcagtctggaggtcattggtgacccaggaggagcaaattcaatagggtggttgcaggaggcaaaagccagatgttagtgggttgaaaaaaaaatggaaagagaaaaagtgtggaaagcaactataaattactattttgggaaattcggatgagcaagtgaggagaaactggatatcagccggagggtcacatgataaatgaaggatttttagggttcatttttattcattaaaaatttattgactccctgctatgtcccagacatccttgtgctaagtactgatgcaataatgaacatggcagacaccgttcttgcttccagggaacttataatctaatgagtgacaaaaacaagtaatggtcagggaaggagagcagggaaatgaggagacaacttcaaggcaaagagggcgatgggagaaaagtgtgtagagaaaaaagcatatagcagatgtgcacttttataattaactaaagtccatacttgattcagattttcttagtttttaatcagttccctttttctcttccaggttcccatccaggatcccacactacatttaactgtcacacctccttaggctcctcttggctgtgacagtttctcaggctttcctaagtttggatgaccttaacagttttgaggagtcctggtcatgcattttgtagaatgtccctcttgggatttgtctgacatttttcgcttattaaactggggttatgagatgttgaaaggaagccccaaaggtcaagtgccattctcatcacatcatgtcaaggggacctgctgtcaacatgccttattactgttgatgttgaccttgatcaactggcttgaagtagtgtgtatcaggtttccctgctgcaaagttattcccttcccctccccatttccatgttgtattttttggaaggaagtccactctgttctacccacactcaaggagtggagagttatgctttatttactttaaggtggggtgtttggtacataagttatttggaattcttctatgtaggagatttgcctattctccctaattaattcatttgttcaatgttttatttatatccatttggactcatagataattattttgtactttgggttataatccaatactactttattttgttgttcaaattattccagttttggccatcgggagctctttcagctggctcctgtgtccctttgacatatccttatcattgtggttttttaaaaaaaatattgttttcaaaacttctttgctttcttgtaccataagctgtttcaggctcatctcatttattctctgctccattcctagatgcatccatttctctaaggagccctggtttattttattatagaatggtattggaagccaagatatgggtgctaggtatgatcattgataatggaaggctgttgcttgtagacccttttagccatcagagtaaggaaatacatgtgtgtatactaacctgtgtatacatacatgtctatattattgtatgtattcatctgtgtgtatatttaaccaaatatgagcttatgctgatttctctcacattcatgtagtatcacatggatcattctagcttcctttcctatctgtaacttactgctaaatagtgagaacctagcttccatcatcttccatgtgttctattaatggttcaattctgttgttcatgcatagtggtttctttgcctctgtggtacatgactttcatcagagtacaatgcttatatgcaattattttgcctttagtcttacagataacactgatttctaaatgtcttagtctgttttctgctgcatcacagaataccacagattgagtaatttataaaggcaagaagtttattggcttatgattctggaggctgggaagtctaagatcaaggggctgcctcttgtgagggccttcttgctgtgtcataacatagtggaaggcaaggagggcaaaagagggtgagagcatagagcatatgagacacagagagaataacggagctgaactcccataactaacccattcccatgataacagcattaatccactcatgagacaagccctcatgacctaatcagttattaaagtttctatctcttaatatcatcaaaatggtaattaaatttcaacatgagttgtggacaggatgtccaaaccatagcaacaaagtaatataggtcagcatagttctctgcacctccttcagaaaggttattttatacatttataatatagtcagattattttgtcacagtctgcattccactgtgaaatctcctgaccacccaaatgaatttttaaaatgtgcagatattaaggtttactttgtgttgtaaggctctatagattttgacaaatgcaaaatgctgtgtatccaccattatattatcatatagaatagttttaccaccctaaaaaaaccctcctctcttccaacccccgatctgtttactgactttctagttctgctttttccagaatgtcatatgagtgaaattttttcagactggcttctttcactaagcaatattcatgaaagattcattcatgactttgagtggcttgataggtcattcctttttatgactgaatagtattccactggatggatataccacagtttatttacttattacctgttgcaggacaacaatcttggttgcttctagttattgatgattataaacaaagctgctataaacattcatgaataagttttgtcaaaggaaattgcactgggcaagttaaataggcaagggggaccttattccagactattaaagcaggagagagagattgaaattaactccactgaaaaaaaaaagagcttttaagtgttggggtgagctagtgaaaaagtactggaggatattaaggtgaagcttggctaatgtgatcagggcatttttgattactattagcacttttgaagttagactccttccacagagtctgggagataggggcactatatttattgatgtttacatttcaaagggacagctcccaggtgcttgagacatccctgggtggcaaaactggcaaggggctggaagaagatttccatcataaaggggcagagaaataattcacaattgcaatttttctaaagtaaatgatctaagaaaagggaggtttagggacctatggtcagggagaaacctgtctaaagtgtagacaaggtgaggagaatgttagggccattcttggtccatttttgtatggacttaagttttcaaatcatttgagcaaataccaaagagcatgatggctggattgtatggcgagactatgttgaacttcataagaaactgccaaactatcttccaaagtgatgcactatttttccttcccaccagcaatgatgagagctcctcttcctccacattcagcaactggcatcatctattttttaggttttggctatttaaataggtgtgcagtaggtattcttttaaacagacacactccctcaggtcaccagcttaccaagacttgtggacatccctctgtcagccttccttctccacatatgctactttcttccagttgtctggtcttcccaggctccacttcatggattctttctccaacactctgctgttcttgagtcttgtaacccactccttctctaagcccaagcccaagactaggttattgaatacgtcatttatatggagactgaaatctcctgctggggtaaagcagaaaaccgtgagtaggtttcaacatcttcagggaatgagaggaagttctaagaggttgctggatggtcagatgcatagaggttaagggcggatagagcccagtggtgtgagccccagcagaagatgaaaaagataaggtctagaaagtggcaatggggatccagttaaggtccaactcaaatttggtataaagtggggtaaaagttatcctcacgtgaggatcagattcccattaagcctgggagtgagaaaaagttcgacaaagaggccaaagatacagaatttttaacattaacaatggaatgagtttttcagtggacagagctacaagatttttttttttttttttgcttctttgattttttttttgtttgttttagtaggcaggctctattctggactcaagactgaagaagtgcaaagcagcagtcagctagaatacaagagtgatgagatggggaaaagtccttgcctttcattgggtgactgaggatgagaactctggtagcaaatgacttgcctcaaagtacttaattttggccaaaagtagcaggatatttgatcccagaaatggctgagggttcacaaaatatatattgcttggtcttgaaaaagtggtgagagctgctatgtggcttataggcagagatggaaagaatccagttctgggtggacatcatctcatggtttgaggtgtgttggcaaatgcccagtttgggaaaaggctcccataaagatagaactgcatgtctacagaatggcccttggaaggtatggcagtagcagaagtatgccactcagacctcttttgagaggacctgcagcagggagaatagttgagtgacagttcccagctgttgttccatggattgcaaggccacattctccaggttgcttccaaccaatgctgggtgcagctggcttactagcacagccctatttctgcccagtgctggatttccctaatgggcaacttttgcttggagactctgtattggccaggtgaaaattttctcagaactgtgttgcagtctgaggctcttcctacacaattcttccttccttctctcctttttcacatgtaagacttgcacatactcctcttgcctatcccattccttcatccttcatccttcatggccatttccctgataaatcttttgcacatttaattctgtcttgagggctgctgctcagaggacctgaactgatacagtatgggagtgtcagaggactttattctatgcagagcctatgtcagtgagttcaaagggtcttatttttgttcatccattcgtttttgtcatcccctgacctctcatatttgatacttgtcattgctcctttagctatgatggtgacccctctgactgtatacattactttgggcaaacccctcctactgcaacctggcgctggaatcctcctcctagttcagcatcttatttattggaggagctccttctaacacattccagctcataagtaggaatcaggtgattttactaaatgtgtgtaactcttgtaggctgaggattaaagtattcctatactagctggaatgtaaaccggtcctacaacacacttcaggtagtcctagagcctggacctgttagaagatagccacaccttggaaggtgacagtaagctctcaggaataggctgggattttttttttttttctcgttcttgaatcttgcggttaggtagacatacagacagtgtctgcagcattcccaggagggcccaggaggtataaaaccccattgagaatggcaaagaaagtttcccaaagaatctcatggaatgattattcccccattcctatttcccctcctctcctctccccacagcactcacaaaaggcctgtggtctgatacccctacggcaagagcagtttccactgtgaggtctgaggaataagatagggtcactgacaagaaatgagtcactaattcagaaaccaggggtgttaggaacagtggtgaatggggtggttcatgtgcagttgaccacaggggtcttgaaccttgtgaaagtgccaacgtctggttttattggctgccggctgcacggtgtggtgatgggcctgctggacgaaagactcaggaaagggcagttgctgtgaggatcagtggagttgatggacattcaggcactttgtaaatgaaaaggtcatatagcactgagggccataggtcctggcctgggtgctcgtcggagtaggacctcttatgagtcgtggcatctctctgctttgttttccaatctaaaatcctggccacccccgccccccacctctccttgcagattggctgaagggagtcagtgagggagcagacaggaacacatttttcctctgctctatcctgcaaacacaaactctgtgcagatgaggcgtctgttacagaaactgttaaggctcgtcaaacaaatcaagctatatacgatgtggcaccttcctccctgggcgagcaggtgcagtgtccagcatctctggcccccgtggcctcccagaaggaagggagggagccttggcagtgtgagcagaagagcaggccatgccatgctttggggaagagaaaagggaaagacatgtgtgtctggtgtttgttccctgccaacacttcctgctcctttgttcttctttgtccagtcattgttatttttaaaaaaaattagacaaaaataactatattatgttttctaaaaattatggattctaagcattgctgctgaaaaattatcagaattgatattgattgagctcataatctgtgccaggtactgggctaagcactttacatgcacgagcaacaagagaaggaaggaactattgctatgcccattttacagatgagcaaagtgtggctgagaaaagttaggtaatttgctcaagacataaactagtattgtaggggatggaatggaggctttgctttaaagtctctgtcctcatcaaaataccttaatgcctttccataggtagaaatacaggctgctataaagaagaaagcaataaaagcattcataatcctgtccaccaaataaaactgtcgttaatattttggcatataaccttctggatattttctaggctattttacattttttttgcaatttttttcaataatgtcctatggacatctttccatatcaataaatatcattccaaagaatgaatttttaaataaattactgcatactgtttaattatatgaatgcaccataattttttaaaccaatctctatttcttgggtattgccagtattttgctttcataaacaatgctgtggtgaacatccttgttaatgcatctttgaacacttgtccaacatactccacagcatacattgctagaagtggaattgaagagttaaagtagctgtaaacattttaaacatggcacatattgacagattaccttccagaggggatacacggattcacattcccactgctaggattctttctgagataagtttgagaagtaccatttagaataatctctctctttttttttcctgtcactcactagtactcactttgatgtctgtccctcttaatttttggatttacttcctgtttttggctcttatggtttggaggctctccaaatgttctcctcatgttgttttagttgtttaaaaattattttattgatgtaaatttggcatatcatataatttacccttttgaaatacacaattcaatgattttttattaaatttaccaagtggtgcatccatcaccataaatcagattagagtattcttatcatctcggcttctgcacagcaaaaaaatcagcagagtaaacagacaatccatagagtgggaaaaatattcacaagctatgcatccaccaaaggactaacatccataatctacaaggaagtcagacaaatcagcaaggaaaaagcaaataatctcatcaaaaagtgggctgaggacatgaatagacaattctgaaaagaagatatacaaatggccaacaaacatgaaaacatgctcaacatcactaatgatcagggaaatgcaaatcaaaaccacaatgtgataccacctcactcttgcaagaatggccataatcaagaaatcaataaataatagatgttggtgtggatgtggtgaaaagggagcacgtttaccctgctggtgggaatgtaaacgagtacaaccactaacagtatggagattccttaaagaactaaaagtagaaatagcactcgatccagcaatcccactcctgggtatttacccagaggaaaaggagtaattatatgaaaaagacacttgtacatgcatgtttatagcggtgaaatttgcagttacaaaaatatggaaccagcctaaatgctcattaaccaatgagtggataaagataatgtggcatatatacaccatggaatactactctcccatcaaaaggaatgaaacaatagcatttgcagcaacctgattggagctgaagaccattattctaagtgaagtaactcaggaatggagaaccaaacatcgtatgttctcatttatgagcaggagttaagctatgaagacacaaaggcaaaagaatgatataatggactttggagactcagggggaaggatgagaggagggtgagggataaaagaccacacactgggtacagtgtacactgctcgggtgatgggtgcaccagaatctcagaaatcaccactaaagaacttttgcatgcaactaaacaccacctattcccccaaaaatattgaaataaaaataaaaaggaatattcttatcatcttaatatctctcaagcaagcatatttactgctaatatacatctttccctcttctctgttctttccccaagtaaccagtaatctaccttctgtctctatagctttgtcatttctgaatacttcatgtacatggaatcatgcaatatgtggtctcttgtcccatcatgtttttgaggtttatccatgtcatagcatgtattggtcatgccgactagtttatgttgtatgtgtgtgtgccgtatttggtctagtcattcattcaccagttgatggacatttgggttgtttccaattttttgatattacgaacaacactgctaagaatgtccacgtgcatgtctgtgtgcaaatatgttttcatttttcttgagtaggtacctaagactgaaattgctggatcataaggaaaactcatgtttcactttttaagaaattgccaaactgttttccaaagtagctgtgcctttttatattgctaccagcaataaatgagggtttctggttttccacatcctcaccaacatctattattgcctgtcttttttattgtagccattagtgggtatgaaatggtatctcattgtggctttaatttgcatttccctaatgactaatgatattgggcatttttatgtgccttaaatttttttaaattaaagatatccactgtacaaaattaaaaatatgcagaaaagtcaaagaaaaatataaaaatcccttgtatttccacaatctagatataaccattgttactatttgaaatgtttttttttcagtcgtgtgtgtgtgtgtgtgtgtgtgtgtgtgtgtgtgtgtgtgtgtcttgtttacaaataggggtcctactatgaatactgcttggaaaattgttctttcctttcatagttcctcatatcattagagattcttccacaactttggttataacctcttcttcctcaatatactcattctaatcagtcttacaaatgaaatcttttgtggaatcccaataaacaaaatggaaagcagagcttctctaaatagagattgaatagtgtgggtcatgctagatcccttggcctttttgtggcttctgagagccagtttttaagcctctcttgtatattatttttaatggctgcaactaattctctatattgaacattgagattacataatggctaagcagataggaaccagcctgctgggatttgaatctcagctctgccatttactagcaatgtattcaatggtgcccttggccttggtttccttgtttataaactgggaatagtaatatcactcactgccataggagagctatgtgggcatacatgcaatgattacaacaattttgcctacctcagtgtgagttacttaatttcacatttgtataacataaaatttaaaattaacagttttaaaaaatgtatgtgacaggctaacaatcattgccttggtaggtcacatgaactggtcaatggagtatttcagagagaggaagtcagtttatactctaattcgcagtatacagatataataagaggtcttgaaaatttaccttttgtattgtcacaatttctacaaggtcattttttggtgattttgtgaaatgagagattgcaagaaaaggcattacatttaaatttataaaagatgtaactgttaactattgtgttcaaaatataagattctgaggataatctgccccagaacaccctgatgcttcagcattgtttgctcaaaaaagcttttcaagaaaagggttttctcctaaagaagatttctaatgccaacgtctatggcttgttttgaaggagatagcttctacggtgtttgctcatcctgttttacaatatgtattaatatttaaaccatatatacactttaaattgcttcccttttattttccctaaggccttgatctttcaactaagggtctgttgactaaatgaatgactgattgtctcttatttaaatctgcttgtatgtcccatagtaacaatttattgcttatatcatataaagcctgcatgtttgctgtattgctagacattatgcaatttttggttatcattacaaaggaatatttccctccattttcccattacatttccaactggttattattgatatggttgataggcaaataaagctgaactgccacatttcagctgtggtttcacaactgacacagatttcagcagtgtcacatttagcagaacacaaggctgatatttaaaagaattgaaaaacaattaaaatctttcctgaagactcactaaagggtgcaaggggagcattacattgcatggtgcacagcaaagcaggctagatgcctcatcattggtcacccatcctaccagctgtgtatctctctctctctctccattcacctcttccagatctattctgctcttccttgggtagcaccaagctcctttaaatgtcaccccaaactagtatttctaggattattccaactctgcctgtctatccattactgtgatcagcaccgcccaagctgagatccttggtcacttgagcaacaaaacattctctattagttatttgttgctacatgacaaattactgcaaccttagcatcttaaagcaacatttattatctcacagtttctctgagtcaggaatctgggagcagcttagctgcatggttctggtgcaagatctctcatgaggctgtggtcatttcaagattcaattagtgggaggagctgcttccaagctgctggtaagccttagtttcttgcggctatggtttgaacattttgtcccctccacattcatgtattgaaggcttaatccccaatgcaacagcattgggaggtggggcctaatgggagttgtttgggttaccagggctctgccctcaggaatgcattaatgccactgtaacaaggcttgcaaggggctgggtgagttggctgacgtctgtaattccagcactttaggaggatcacctgaggtcaggagttcgagaccagcctgaccaacatggagaaaccctgtctctactaaaaatacaaaattacaggggcgtggcggcgcatgcctgtaatgctagctacttgggaggctgaggcaggagaattgcttgaacccgggaggcagaggttgcagtgggccaagattgcaccattgtactccagcctgggcaacaagagcaaaactccatcttggggggtggtgggagagaaaaaaaaggcttgcaggagtgggtttgctctcctcctcttctgttacataaggatgcatgtttctctcctccagaggatgtagcattcaaggcaccatcttggaagcagagagattgggccctaatctgccagcaccttgatcttgcactttccagctgccagaactgtgagaaataaatgtgtgttctctatgcatgacctaatctgtggtattctgttacagcagcacaaaatgaactaaaacacttgccatgcggggatctacataggccgagtgtcttcatgatatgttagctagctttccccagaaaacacacagagagaaagtgatgagagagagacagagagcgagagagagagagaacccaagtcagaagactgggggagtgaaatgaagcctcacttcttgagagacatattaaagaattgtgaacatatctttaaaaccctcatggattactttttatagtgagttgggaaagagtgtaaattattaggcttttttttttagacttggcctgcataaaaatgctattgatttctgtgtttgcattttttaattggccagcttaccaaactgttattagatcaaaagtcttcagttaatcctttttgggtttccaggtaatcacatttttcctttcctccaatatttatattgttttttttctctctccttttcccaatcactggttagaattacctgaataacaacaataaatgataaagataagtaatggtggtgatgatggacatccctgtttcatttctcagaatgtctttagtatttcattgataaaaatgatgctgctgctcttggtttattatgttaaggaagcaccttttattgtgctaatttactaaaaattttcaactcgttctggtttttggaagttggttttgttgtaaggttttaagaactgcccattcttggatttcctaaagcttcaaatgaagaattttaggctttcagaatcctagcatgtgaccaggccagagctcatgtccaaagggttggacaggaagattctgacatttatcttgaacttactactcccaagttcttttctgtccctcctttgcagtctccaccaaagaactctttgttacattccattttctgtccccagaaagcatatttttaagggaggaagagaattatctgggcaaagctgggcacagtggctcacacctgtaataccagcactttgggaggctgaggtgggtggatcacttgaggtcaggaattcgagatcagcctggccaacatggtgaaacctcgtctctactaaaaaaaaatacaaaagttagccaggcatggtggtgggcgcctgtaattccagctactcagaaggcggaggcaggagaatcgcttgaacccaggagacggagggtgcagtgagccaaaatcgtgccactgcactccagcctgggtgacagagcgagactccatctcaaacaagcaaacaagaattatctgggcaaaggattgctcttacatcgactgacacaggaagatcagggtcatctatggctgggctccacccacccctgcccttctctcgcccctggagggagtcaggtgattcttgtcatccgtggagagcctccagaccaatggctgatttgtggtcctcagggttaatggtgcggtacacaggagaacctgtgcaggtagctttttctgcaaataatttctctaggagattgaatggtgggcaacctgtcagtatcctccccactccatggaccttgtttataagttccacccttgcattatggtgatctcgtattttttgactcaggggaaaactagtttgctataacagttggataaaataacccttgtgactggccccattaaaggatgatgtttagctttgcttctcaaagtgccagtgagcaacatcagtgttccctgggggcctgttaggaatgcagactctcaggccctatgcagacctgcagaatcagaaactgcagtttcacaaacccacaggtgattttcatgcacattacagttttagaagtgctaaagcactttggctgcacattgaatcatccggagggctttaaaaaacctacagtgctcaggccacaccctagactagtgggtttcaaccatgtggattttgccctacacttcctaatatttgccaatgtttggaggtagttttggttgttataactgggttgcaggtactactgccatctagtgggtagagatcagggatgctaagcttccttcagtgtagaggacagcccttcaaaaaattgttcggctcaaaatgtcaataatatcaaggttgagaaaccctgcccaggatttctgagggagggaccaggcatcatcaatttcccagttttaattctcagacccctaggggctgagtgtggtggctcacacctgtaatcccagcactttgggaggccaaggcaggaggatggtttgataccagcctgggtgacatagtgagaagttgtctctacaaaaactaatttttaaaaattggctgagtgtggtggcatgtgcctgtagtctcagctactcaggaggctgaggcaggagaatcacttgagaccaggagttcaagactgtagcgagcgatgattgagccactgcaatccagcctcaacaatagagtaagactctgatctgtcaaaacaaacaaataacaaacaacaaaaaacaaaacaaaaaaattcccccccaaccaaccaaccgaacaaaacagaatcccctggggctgattatacagctccccggacccttctacaggtgattctcaattaatgggtctggaatggggctggaattcacaattataacaagtacccaggtgatgcttatcatcagggaagtttggaaacactaacccaggggcagggaacgcatagaagccaggtgatacgatttgcatttgtgtccccacctaaatctcatgtctaattgtcatccccagtgttggaggaggggcctggtgggaggtgattggatcatggggatggacagcccccttgctattctcgcgatagtgagtgagttctcatgagatctggttgtttaaagtgtgtagcacctacccctttgctgtcttcctcctgctccagtcatgtaggacgtgtctgattcccctttgccttctgccatgattgtgagtttcctgaggacttcccagccaggcttcccgtacagcctgcagaaccgtgagccaattaaacctcttctttataagttacctggtctcaggtagttctttatagcaatgtgagaatggactaatataccgggttataagttagcttaggatatctattcctaaagatgtgctgaagttgagtcaggatgcaggtatgagttggcacctagcggcactttctcaaaagccagggtttgggagccctgcacacaatgagtcagtcctactgaacagctgcccttatcctgtataccagctccatcccaatctccactctgtgtgtccctcaggccgaaagggagatgctgttattctgtccacttgaactaaggtacctgccacagattcgccttgaaatggattcagaggcaatgggtgtgtgacagaggaacaagtaatacagtgtctaagtgctcatagcgttgccctctccattgttttctggggggatcctcaaatcacctgcgtagctcctgggccttgctgtgttgcttaggataaagaatggggaggatcaaagagaagctaaagaatagttactgatttaccaagaaagggtagtagtgagagacatagcgatcagcaaaataaagacttatttttcagtgtgtgcatcttttgaatctcagtttggaagtttctgggaatgtaacattgtaaaatggccatgaggtggtcttgttatactcacaagttagatggttttgtgaaccaaaaccgggtccatttggccttcttttttttttttgagacagagtctcactctgttgcccaggctggagcacagtgatgtgatcttggctcactgcaacctctgcctcccaggttcaagtgattctcctgtctcagcctcctgagtagctgggattacaggtgtgtgccaccatgctcggctaatttttgtatttttagtagagacagggcttcaccatgttggccaggctggtcttgaactcctgacttcgtgatccacccacctcggcctcccaaagtgctgggattacaggactgagccactgcgcccagcctgaccttctttcttttggctctctttctgccctttgtaattttcctgacctacatcctgttccctcttcctttggcaaggtatgtgtcatttcaatttgcaatttcaacatgggatgagaaattttcaagtaaatctgggtttagtgaaacaaattaaaatccaattaaggaaataaaatagtgaacggtgaagtgtctatgagagttgttgaaggctggggtggggattcgtttgagctcacaaaacagctgaaaattacccgcaggggatgaactccacagtgaaagcttaggcggcaaagctgaaaatagggggtaattacaggcaagagtctgtgacctgccagatagagatgtgaggaacaggttgcaagggaaatgtatttgattaaaaagcagcttaacctctccaagaagcctggattgaagaaaaggaagaagaaaattataaaactggataaaacttcacgtgaggcaaatgagagggtgtggaagtaaatatacttgtttatatttctcgcagggactcttagagggattaaagtgagtttggcaacactgcttgagaccctgccctattgtaggtgctgtgctaggggcccaggatacagacaccaaggaagcagcacagagcctttctgtaagtgcttgcaggctggtgggagagatgggcaggagcatagggagagagactgtttttgccagttcaggctgctgcagcaaagcaccatagactgggtggcttataaaaaacagaaatttacttcttacagctctggaggctggaagtccaagatcagggtgccagcatggtgtaattctgatgagcttcctcttctaggttgcacatggctgccttctcattgtattttcacatggggtggggtagacatgagggagagggagagagggtcggggagagggggagagagaaagaaagctcttatgagggcactaatcctgttcatgagggctccactctcatgacctaatcacctcttgatacagtttagctgtgtccccacccaaatctcatcttgaattgtagctcccgtaatccccacgtgccatgggagggacctggtgggagataattgaaatatgggggtgggtctttcccatgctgttcttgtgacagtgaataagtctcatgagatctgctggttttataaaggggagttcccctgcacatgttctctggcctgctgccatgattgtgaggcctccccagccatgtggaactgtgagtccattaaacctcttcctttataaattacccagtctcaggtatgtctttattagcagtgtgagaacagactaatacacctcccaagtccccacctcctagtacttttacatggaaagttagaatgtccacatatgaatttgttgtggttaggtacacaaacgttcagttcctaacagatgcccccactcccctggtctcaaaggtatgagcctgggatgattgatactgctctctctttgacgaccaggtgggtccttaattatctgttgggaggcattgctgcaggtctaagtcgctgcaggctgctgagggtagagggaatgaaatggagaagtaaagcctggactgaggtgaggtgagtaaggcacttgtctcaggcccaaacttaaaggggtgcccaagaactcagtaattatattgtaatgcagtggaaaaacagttgaaatgcaaatatgaatacaacatatcacaacgaacaaaacatcaacatttcaaatgaataaagggtcaagaacagtgtcatgccaagccatctttaagcctgaggcaaaaggacaattcagtaacactgatcctatttttatttcaagttatgatgttttgttcatctcgggattctttgcattcattttgatttttaaaaaatgttgcattaaaatattctttatcttgattgtgaagttttttggcacccctttaaaattgtgcccaaggcaagtcccagccctgtgaagaagagagatggtgttgtctctagggtggccccgtggacccactctgagccttctggaatcagagagctgtcagtttgtgggaaagggactgtttgcactaggatctcatgggatttgggaagcagagtggcatcaggcctggtgacaacctaagacagagccttgggcaaggggcattctcctcgtctctgaaagaacctggggtgactccgtgcggtaggaattgaagggaacacaacattatgcgggccccagagggtttgatggctgtagggtgccgcctcctggaagcacgtcccttgcacagtgtgtgcagtttgtctttgtagtcctagttcttaaaacacagtaggcactctgtgtccattgatgaaagcatgaatgcaattggtgacttgtgccatcttgtggttagacttcctggaaccccagaaggagatgaaaagatctaactgcaaaaatgttgtatttcctggcccctagagaaccaagaatacttccctacttgaaaaattgtgattaaaatacacataacattaaccattttaaccattttttaaacattcagtggcattaaggacattcacattgttgtgcaactatcaccaccatccaactccaaaaatttttcatctccatgaacagaagctccgtaaacaataacttcttatttcctctcctcccagcccttggtaaagcactattctatttcctatcaatctgattactctagataactcatataagtaaaataatataatttcttttttgtaacaagctcacattacttagcataatatcttaggtcaatccatgttatagcatacgacaggatttcctttttttttttttttttttttttttttgagctgtagtcttgctctgtcacccaggctggagtgcagtggtgccatctctgtgcaccgcaacttctacctccagggttcaagttattcttttgcctcagcctcctgagtagctgggattacaggcatacgccacaacacctggctaatttttgtatttttggtagagatggggtttcatcatgttggccaggctggtctcaaactcctgacctcaagtgatcctcttgcctcggcctctcaaagtgttgggagtacaggcgtgagcccccatgcctggccagggtttccttccttttgaatgttgcattgtacatatataactacattttgtttatccatttgtccatcaacagaaactgggttgtgttcatcctttggctgttgtgagtaatgctacaaagaacacattctcctgcctcttactctaggagagatacaaaggagagggccctgaagggcagttcccattttgattctattttaccctccattgtgggctcggcctcctggacagagtcagtgacgtcactctagaccctctgaagactcattgttttcttggcactgggtttgatgttgcagatccaaaatcaactcagatgtgcccttcccctcaaatagctcagtttagcatgggaggagggggttcagggagactgttggagccgatacatcagcaaatgattctatttgggtgtaggtttggtcagggaagcaattgcttctctttaatatttagatcttagtgtaagcggggaactcctgcaagaggagaagattttgcgaaagtgggtatgataagaaatgtggacttgatggaaattttgaagtcttgatcaatatccccttttgaatgtacagactattcaagttaggtgggtactttcaattctgagactagataattcttgtgtgaccactgagcacttgctgttggggggtttctgagcctgagccagggagacaaaggggctgctgaggagggaactccatgcattacaccccgttctcactcataaacacacacacctgtgtcctgaacagagtcaggcttcagaaagtctttgaaaccaagagtccattgggctgatttcacaggaatgcttcatggctgagagagaaccatccagcctattaagagtcatataccctctttaatgtggatgataaaactttaattaaagtggtgattagaaacagaataataatgaccactaataaagtagtttatagaaatcgacagctttacaaagagcagttgctggtggcttgctgtaggcagccctggagcatgggctctgggcagggcaaaaggattaggggaagggtttactggaatagagagataacataaaaggcaatttataatgtgtgacttcgagcaatgagctagagaaaaatggaaagctgtgatgtggatggaattcattgtacctttgcattatgaatgaactttacaagattgcaggctacagccaggatttggttacttgtgtacaaatgagcattatctacattgtttttcttctgtgttgtggtctgtgtatcttaggatgaagaggcaggacaaatgaaaccatgtctgagaaagcctttagcaattgatgcctcattaacagtaataataaaggccaaagtagtagtaatagcaataatataataacacctactaagtgcctaccactttcatgttttattaccttccaggtatatagtatctctttttgttagatgatgcagaagatgtaaactgagaaacaggattggaaagggaattcagggaagatttcccagaggataaattttaaatgtaggattagaaagggagtgagaggcttgctccagcagggggaagaggaagagggaattttatagtgggaagaatttcaggaaggttccattcaccttctcccatgtctccccacacactacctccccttagaaatgcacctacaactacataatagatttttgtcatcaatatgatcttagcatctttttttatattattatactttaagttctgggatacatgtgcagaatgtgcaggtttgttacataggtatacatgtgccatggtggtttgctgaaaaaaaatagaatgttttataatttttttattgagaatgcccagttatgccaagcataataaataaaggtcagtagcatttataaaagaaatgcaatgtgggatattggaaaatacctgatagctgatatctggaatcaggcagatgtgaggttagacaccagctctgaggctcactggctacttgaccctggaggaagcatttaggtgctttttttttttttttttttttttttttttgagacagtcctggtccatcgcccaggctgagtttagtggcacgatctcagctcactacaagctctgccccctgggttcaagcaattcttctgcctcagcctcccaagtagctgggattacaggcacctgccaccatacccagctaattttttgtatttttggtagaaatggggtttcaccatgttggccaggctggtctcgaactcctgatctcaggtgatccacctgccttggcttcccaaagtgctgggattacaggtgtgagccatcgcacctggcccacttaggctttttaagtcagtattgtcatcaggaaaatagggctaatatttactgcatggggttcttgtgaggattaaactagaatttaataagagaatacttacaaagcatctagccgatacaacatgcttgaggaatattggttttgcaaactattttccaccttggctccagcttctgtcaccaagcactgtgaacaaggccagggccactgggctgtggtgactgaggcctttatggctggaagtagcctatttcctgttctgtcactccttgtcatgtcaatgttttatttcttcataacactactcctagaaattttcctagttctatatttgcatctttgtttattgtctgtaacccttctccacatattaagccttaggaatgaccttgtcatttggggcagtgttgacttagactgataagtcttcttggttcctgtatcctatccctctcttgcttcctccaggactctgctccagtgattatctccttttctctaataactgatttttctctgtgggcttgcatccactgcacacagaccattgtcattcatctttaaaacaaaacaagatccgcatcctctcttgacccctgtatctccctccagctattacctaattcctctgcttctcttcgtaagaaaacaagattgtctacactcactctccccagttcctcacctcccattttcttctaatggctcctctgttgggtggtcactcccacctgttcaaggaaactcctcttaataaaggtcatctgtgaccacattcggctaaaaccagtggtcaatcccagaaactgcttgattggcgctctcagcagcatttgacagggctaacctctctctaggcctctgggagacccctctcctggttttcctctcccttctctttttccctcccagacccctcagctggctcccctgccccaaccaggctctccaggcctgggactctgatctcagtggccttcctcttcatttacacttggtctctagtgacctgaccacgcctcatcctccacatgctgaggcctcatcacacacctctccccaggcaccagccttcgctatccaagagccacttcctcccatcttcacttggatgttccattgttatgtcaaacaaaatgtggccaaatgcagcatttgattttcttccagctccagccctcactccactctctccatctttgcaaagagtacccccatccacctcatccctcggggccaaagcctgaacttttttatttcctctttctacacactcctaaacgcaatctgttaatacagcctatggactttgtttccaaatttttctgttactgctcctatccagtacaaggcattatttcttgcttgacgcttgcgacagcttcctaattgatctctctggctctgtttctgcctccactcccccatctcccagtctatcttccatagagcagccagaatgatcttcctaaagtagaaatcagatcaggacactttactgcttaaggaatggtttccatttcatttaggaaaacgccccccaaccctcacaaatcttgttccatgacctgcaaggccctataagtccctggttacctctctagtcttatctgtctctggccttctttctgaccctcaaacatgccaagttcttcccttcctttgtttatttatactcgctatgcctcctctggaatactctttcctcagagcttctcacaaactgtttctcattgttcagctcttaattcaaatgtcatctccatagagatggctttcccatcaaccctggctaaccaccttgatatggtttgggtttgtgtccttgctcaaatctcaagtcgaattgtcatccccagtgttggaggaggggcctgggtgggaggtgatagggtcatggggtctgactttccccttgctgttcttgtgatagtgagttctcacgagatctggtcttttaaaagtgtgtagcacctccctgctgtgctctctcctcctttatctctggctatgtaagatgtgcctgctcccctttgccttctgccatgattggtaagtttcctgaggcctctttaaccatgcttcctgtacaacctacagaactgtgagtcaattaaatgtcttttcgttataaattacccagtctcaggtagttctttatagcaatgcaggaagggactaatacttaacccctctttctccatctactcttaatctgattgccccatcttgttttcttgattgaactttgcacctggaagtatttcatgtattcatttccacctgtttggcctccttcactaaaatatgtacttttgagatactgtatctccaggttctggaataattaatactttgcacatagtaggggcttggtaaatgtttgtggaatgaatgaacaaaaggctgaagagcttgtttacccagtgaagcaatataaaattctgattcccctctagctactccccttcactccccaagtctttcctccctgctttttattcattgaatacaaatttcataaggatttggaccacaacacagaaagacctgggaggaaacactgcataatccagtgattttaagagtccccaagttctaattagtatggtgcacagcaatgatgctaaatgaactgttatagtcttaccaggtcaaaacccagctttgtagggcagcccaaaatagaggctgtgctctttttgcctttagcagggcaatctgtggagtctccaaaggtgtattaaggtttaatagacaaataatgtacttggtggaattgtgcaagaggagagaagctagcaaactccctggggtgtggcttccggatattgaagtttcctgcaggggcacttggggcctggatggatggtttcaattagaattcaattagcgtcaatcaaggcaaactccaggggcagccaattcatcccaagtgcccctaccccaactcccttccaagttttccctctttcagggcagttctgaaacctctgcataggcaaaggcaagagaaggaattgctctcgaccgagttcagtgtggaactaggaacctttaactatcatgttcaaactcacttgtggaccagctgaccctggccaccctatctgacccctgactggccctttaggtggttgggtttgtcccaggttacacagagcatatgaaagtgaacttctagcactttctcaccattcacagcattagttctgaaccacttgtgacaacacatcatataacttgccgtcagtcctcctggcctctgacttgaacattgtcacattcctagcttgggctcagaaattgcctgttgctacttttgtgacttaatgcttctaggtttttctttacgtaattaactacaagtatatatatgtgtgtatactgtatgagtgccatgtggttttgagagacaagctgaatccatttgctggagtgggaaatttggctcagtggtatgtgttgccaggaatactatttacctgggaatttcatggacctcttgggatattagagggagagtattttgaaactgatggttaaattttgggaaaccaaaattaagtctctcggctgggtgcagtggctcacacctctaatcccagcactttgagaggccaaggcagatggatcacttgaggtcaggagtttgagaccagcctggccaacatggtgaaaccccatctttaccaaaaatacaaaaattagccaggtgtggtagcggacacctgtaatcccagctactcaggaggctgaggcaaaagaattgcttgaaccctggaggtagaagttgcagtgcaccgagatgacaccactgcattccagcctgggcgacagagcgagactctctcaaaaaaataaaaaaaaaaaagtatccccagctaagaaaggaggataaaccctattacccacctctgcggggaagttcttggcataggttagaattttcccttgacgttgagtttccttctgttttgagacacaaattgattattaccaaggaaagagactttggttatgtcatagtgacactgaaatgttctctaaaccagtttcagaggggaacgtgtcttgaaattgttagtgaagaacaggcactctttcactacaaaggccccttcttgggaatatagtaaagtagccctaatccttaatcctccctcctccatctccaagggagcacaggcatccagggtcaacaacctggggagtcaagggatttcctggtgtaagtaccatcaacagcagttgattaaaataccgttcagcagaacacagaggggacacccctggcacaaggcagaaaatgtcagttgccaggaggggatgctattttcctgaaacctactagatgaaagcatcctagagactgtacaaggtgaggacttaaggccccactgaatgactttttttccccctcttaatcatagcttctatagatttcttatgtaggtttgcatcactaacttaagttagtgatatgtttctgccttccccttggttgggaaaccatgggtctaccacaatgcctgcaaaattgcttgtgcatagaaagcatcaaaaatgcttgttaaacacgatggatttaggcatgagctttctcccattaaatatggcttgagaaaactcttggcatattagaattcagaggacccccacacgacagctctatggcttgaaaagatgagtcagcttctcaaagaggtaaaaagcaaggattggcaattaaagaggaaatgtcaagccgggcagggcagccccgaggcattctgtgctcttagcaggtgtaactgtccagattggagcccttgctgccggcctggcccaaccatcaggtggtgaggaacagtgctcttgacctttcagctttgcagcagagccctttccccaaggagctggcagacataatctgttccatgaactgaagcagcagcaggcacctttggggactggaatttctttctccatggtgtgagtacagctcaccttgtggatgtgtgttttcccttctgaagccacccgtgcctgcagccccagggcaggagagtactgacctcactggggagactttacaccccaacccagtgccaagggagtatttagtgagctccagaagtttcacttactttgtatctttttttgttctattttattttattttttgcttttttgagacagagtcttgctctgtcacccaggctggagtgcagtggtgcaatctctgctcactgcaacctctgcctcccgggttcaagcgattctcctgcttcagcctctcagtagtagctgggattacaggcgtccgccaccacgcccagctgatttttgtatttttagtagagatggagtttcaccatattggtcaggctggtctcaactcctgacctagtgatccacccgcctgggcctcccaaagtgctgggattacaggcgtgagccatcacgcccagccaaaaaaacttttaagttcaggggtgcatgtgaaggtttgttacataggtaaacatgtatcacaagggtttgattatttcttcacccagatattaagcccagtattcaatagttatcttctctgttcctctccctccttctaccattaaccctcagtagaccccagtgtctgtttccttctttgtgttcataagttcttatttagctcccacttataagtgagagcatgcactgtttggttttctgttcctgtgttagtttgctaaggataatagcctccagctccattcatgttcctgaaaaagacttgatttcattcttttttatggctgcgtagtatttcgtggtgtagctgtaccacattttctttatccaatctggcattgatggtcatttaggttgattccatgtctttgctattgtgactagtgctgcaatgaacattcgtgttcgtgtgtctttatggtagaattatttacatttctctgggtatatacccagtaatgggattgctgggtcgactcttattggatgacagcccagtgtgtggtaagagcaccagctcaagagtcagaggcttggatttgaattttgacttgtcatagctagatgacttaggcacataagcactctgagattccatttcctcccttgtaaaaggggacaacagtgtctgctgtgaagttagaaagtgtatccatcatagtgggcggggaggaagtgttgttcctttttccatcttatgtggtttccttatcgttaacagagtagactcttgaccaaatggcgaggctgccctcttgggaggcctctgcctccttgttgataggtgttctctagtctgttgttttctgcctatacagataccttctctggcccttggcctcttgtctggagtttttctgtccattaaaccctatcaaagctaacccatcatactgtgcattctctcaggcccttgctcaaaacagaaaattgtcatcttatatgtcttattacattttcctgtagggggcaaggccttcaatctttaggctaatagataagtgtcatccatttaagactattgacttatgtatggctctgagcccactgaccactaggatttcctgagggactagggattcatggcactgaaagggacaacttttccctagtctcagtgttactgctcattcttcatagctgtttctgcttgggatccctgtccatttctgttgtcacacactggggctggagtctggttgtgaatccgtgttctttaatggagaccctgatccccttctgggtcttgccaaccttccttctggaagttggattttcaatcattcgtagccatcagatgagactcgttgcttggctctgcatatggctgctgccttgttcctcctgcaaccacgtcccatactctaagttggggtcctttgcattgcagctccagcccagtcaaacctgagaccaccacatcctgctggatgatgggttttggactgctggtttcccatttagggactagttctgatgctgagtcatttctcttagttttcgtccctttgatcctggctcttccccttacttctgctcccagggggctaagggcccagaattccttctgcttatgcctcatgattaagctcaggagcttaatcctaccaatagcattggtttaggacttgtattcactccctttcacacatactttcaaaagtatttcaggcagcttttaataaacaatacttaaagttggcctagacaaacactgaatcactaaagggaggaagggggttagagggacaatgaaagcccaggttaagtatattcttgtccttgaacactaggttttcaattgagttttctaacagccaaagcaaacaaaaacatcagctgcatggctcccttttctagtgaattgtggcatactgaaatcctgctgaatgttacttaattttatacctttaggttaacgtagtgcgttgtttcaattaaaaattttttttttttcttttgagacggagtctcactgtcacccaggccggagtgcagtggcatgatcttggctcactgcaacctctgcttcccagattcaagtgattctcctgcctcagcctcctgagtagctgggactgcaggcacccacctccaccaggcctggctaatttttgtatttttagtggaaacgggatttcaccatgttggtcaggctggtcttgaactcctgactgcaagtgatctgcccatcttggcctcccaaagtgctgagactacaggcatgagccaccacatccagcctaaaatttcttgagtgtgcttaaggaagaaattggataaaaaacactttaagcatcatgatcaattcaactcaaccaacattggtttatctttttaattaaacaagcataccaagtacctggtctgttaatgtgaaacactgttgcatatgctatgggagatagataccaaacctttccatgagtagttcacattgtagaaagggagagacacatcatatatctgagaaataaggtaggaagtagtaagagctatacaagtggcacagacaccatgttgggagagtccagaagagggatcagggatccaagggctcatgaagcgatgtgattgagacaagtagggtctatgcaagcagagtggagaggacaagaaagaaaggtcttttaaagttgaaggaacaatgtgacccccaggcacagatgtaaacattgtaggctgtgtttgggaaaaagttggtgtcagggggtcaatggctggttgactagattctagcacaccttcttgaaatataggagaagtcaaggagtatgaaggcagtgtgataggttgaggcacagagagtctggaatgccgtgcctagaagtcagagagctaatgagagtaagacagggagcttaggatctatgtttcctgaacttggctttgtatcctgcaaccaagagaagccagtagaaggtcttgggccagaaagggatatatccagaattgggcttgatgaaaattattttgtcagatgaatggtggaaaaattgaagctggagatacttgagaccagggttgatgctgctgcactagctcaggtaagaggtgaagacagaatgagctggagcctgggcagttaggatggagaggagtggatggaggcaagagacatcattgctcagtgtctttccctggattctgagcttttatgcaccctcattgccttggctatgcatgaagcagtgtaattaagaagctgagtgggagttggagtcagacagacatgggttcaaatcctactccacttacctaccacctacatgattttgaacaaatcattttctttagcatcttactcctaatgtgagggtaagaatatcacaaggccatgtgaagattaaatgagagaatcaatgtgaagtgtttcctgtggtgcttggcccagaaggtctctgctgcccagatgttcttctgaatcctgggccatggtcagctttggtgcttgcccaggtgcctgtaacttacctacctccttgaccttggactttaccttttctgtgtgatattgtctacctcgtccaggatctgctctatttgcttgactctgacctttgataggggattcattttttgccggagacctgtgctctaaatctacgtggtagctactagatacatggggctactgagcacttgaaatatgagagataagtataaaatatacaatggatttcaaagattcagtatgaaaaacataaaaaagctaatatattgatgacatattaacataatattctattttgatgatatggaattaaataaaattttactttaatgcttctctttttgagagggtaacaatgaagctaagtttattgaggacttactgtgtactcagcgctgttctagatacttcaggtgatttgggtcatttagtcatcacaggaatgctatgagtaacttttcttagccttctttttagagttactatgagcctgatacttagagagtttaggatgattcctcaatcacctgtttctttatgctttttaaagtggctatcagaaaattttaagttacatacgtggctcacatcatatttctattggatggtgctgttatagaccagaagtaggcaaatatactcctgtgccaaatctggccctctgcctgtttttgcgtggcccaccagctaagaatgggttttacatttttatttttcaattttcagagacagggtctcattctgttgcccaggctgggagtgcagtggtgtgatcatagctcactgcggcttcaaactcctaggcttaaccaattctcccaccctcagcctcccagattaagactacaggcatgcaccattatgcctggctagttttggctttggttttggttttggttttggtctttttaaattttattttattttattttatttttttgtaggtatggagtcttgctatgttgcccgggctggtctcaaactcctggcctcaagtgatcctcttgccttggcctcccaaagtgctgaaattaggggagtgaggcaccatgcctgacctacgtttttaaatagttgaagaaaacatcaagacgaatctttcgcgagagttacatgaaatttgaattccagtgtctctaaatagagctttattggggcacggcatgctcattcacttatgacttgcgtgtggctgctttcatgtcacagcagcagaattgtgcagtcacaacaaggatcttatagcccacaaagcctaaaatactgactatttggccttttacagaaagtttgttgacttctgctgtaaacattctcctgattttggacccctggatcactatctccttttctgaattagtgtcacttgtctattctagatttctagacttacccaggagcctataacacggcttcttggttctgtacccataacctgcctcctcatataactccctatggaaagggtgccatttcctttctcacttgtagctgccacacgaggctcccatggaggtgacgtatatgtgattattgagcgagccgttctgctggggcttgtgtccttgatgttgcatcctggtgttttgctttgtgtgggttgggatttgccataaaccaagcacaaatgcactgaaaacaccagcttctgaggctcacaaattgctacaggagacagacagacggcaatgctgccaccacgatgggaatggccatctgctgttatcagtgtgcaggatgtcactcagggagtggaactcatggagtggaatgaaaacatctgtttccaagcctggatatgatgtctccaaagaacacaagacagtgacagccgacaagagaagaggctctgggtcccaagacaaactttgcaagaagtccctccgtcactcttatagcccacaaccaccaccaccacaaacccctcttttttttttttttttttttttttggagatggagtcttgctctgtcaccaggctagagtgcagggatgcaatctcggctcactgcaacctccgcctaccgggttcaagtgattctcctgcctcagcctcccaagtagctggggctacaggcatgtgccaccacgcccagctaatcactttctttgagaaaatcttatgattatttttaccataaaagaaagacatattcaccgttaaaaaaaaaaatgacatgatttgggcagggagggtcctggaacttgagttgtatttgcaaacagatcatactgactctcaaattgtctctcttttgcaataatttaaggatccattcccagtactgacttttcttcctggctctatttctgtaggaagaattctttctcaggaggtttttttggattctaatttaaaaagccttcaggtgggtctttccggccagttcacttaacttgtctgggcttatccgaatcccagtggtaggcacaatttaggttcaagattctgacagtctcggctgtgtgcaacttgaggtcagaaactgtacagttttcaacttagtaccctgctgcctaatacagtgcctgtctgtatggaagcacccgtatagatctatgtggtagccactagatacataaagctattgagcacttgaaatatgagatatacatataaaatatacaatggacttcaaagattctgcatgaaaaatatgaaatagctacttaatatatagactacatattgaaataatagtattctatgttggttatactgaagtaaataaataggtctttccccctctagacctgttaatccccaaccaatagcctagaattgcccacatcagctttgctgtaccttccctagattcctttctccctttctacattctttccactctaattgttcatagccttatgttctccttccttcagggcgctccacttaagcactccactggtactcagaccagttcctttaactcttatgcaaataaacttacctcccccttgtcacatttgttcagggtcaaggtcttggtgaaggaaattaaaaaaactatcaagaactaaattgctggtagccaagaaaagttacaatggacacatgtagcttctgataggtatctatcttctagcttctgataggtagaatatctaggaaaatatctcctagcttctgataggtagaaaatagtcatggttcctatctcaatgaatccttagatttctatttgactgttgttcatatgtttagaacaaactcccctttactggagctatttaaaatgggtttgttccttgacactcaacgtgccttgagcagaacaaccaaccattctttcaaataacacacagttaatttcaaaggttcctcttgtttttaggaggtttcatgggagtctatttcttttggtatgaggagcaaatggtcttgttgctactactgtccaggtcaaagagaagtcatctaatgtttgtggtatcatctttttaactcatagcaagcacaggaaactcctgtttcttccttggaaaagcatttttttttctgtatgactttctgattatttcaattgttcagtcattcaattaatatcctctgatattattatgtataggaagatatgacgggactagtgataccctgtcaaaaaggtgccaattcacttggacattctggtgaatgatgacatgtaataagccacaagaaaaatataaggtagaaataaggcaatacagagaatcaaaacagagtgatgtagttaataaatggctattttagattatgtctttcagggaaggctactctaagaagctggtgtttaagccaatatctgaatgtcaaggaggagtcagctatttggaagtcggggagtacaaaggccctaagatgggatcaagcatagtgtgcacagaggatgcttatgctgaatggagaagtggaagataataagaacagaaatgtgagtaaggggcatgtcacaatagggctttgtaagtcaggggaggaagagtattcaaagtattatggatactcttggaggccccctgtttaaaaagtgaggtataatcccagcactttgggaggccaaggcaggcggatcatctgaggtcaggagtttgagacaagatggccaacatggcaaaaccgagtctcttctaaaaatacaaaaacaaaaaaaaaattagccaggtgtggtggtgagcacctgtaatcccagctacttgggagactgaggcaggagaattgcttcaatctgggaagcagaggttgcagtgagccaagattgcatcattgtactccagcctgggtgacagagcaagactccatctcaaaaaaaaaaaaaaaaaaaaatcataaaattcacctattcaagtatacaattaaatgatttttagtaaatttgcagaagtatgtaacaatcactacagttcagttttagatcattttcatcctcctcccccaaattcctcctgctcctttgcagtcattccttattcccaccctcagctcttggcaactgttcatctactctgtctttgattacttcctataaaggaatcatataatatgtagtgttttgcatttgactcctttcatgaggttttgagactcgtccatgttgtggcccatgctttgtttcgttcttctgtcttttaatgctgcgtagcagttcatggcatggatagcccatgttttgcttattcacccacccgttgatggccacaagggtttgtttccagattttggttattataaataataacagccctggaaggttttaagcagcaaaataactgacatgatctgactgtcaggaagattatggtggctaatcttgagggtgtggagggtggaatgaagagatgcagcggtggaagcaggaagagcagttaaactgttgcgtttccctagacaagtatgatagtacttggaacagagggataaagtagtagagatggaggggagtgtgaggacttggggtatgttttggaagagagtaagaagtgtccactgatggattagacatggtacgagaaaagtttggtagatgaggaacaaacaatttgaggctctaatcatttggaatcatcatttgattagagccctgaggtttagacttctctacagccacatgtaatgctagaagacagtggagaagtatctatggagtctctggaaaagatggttgatccaggaatttatactcggccatgatgtttttcagatataaaggccatagacacaaggcaacatatatacatgtttcaaagcctgtgaaaactcagatgacagagcactctctgtatacctttttaaaaaagtttaattattttaactaaagatagtatatatagcatagccttgttcttatttatctatttacctattatctccttagctgtctttctctctgcctatccatccatacttttacctgtatgggaaatgggaattatcataaatgatagtcaccaaataacattagttatttctggttaattgggtttggaataatttttaagccttgttttttaatttctttgtatcatttacattttaaaaataacaaattgtattttttaattaaaaaaatataagcattaagtgcagctaagttgtgagcataaggaaagaaacaccaagtgcagtggagccataagctggaatgggcttgcatccttactggctttctttagaagctgtaccaaccctagtcaattccctgtggactgcttgttacacgaaagcaatagactcttggactgaaacattaatgtcaggtccctgttaaatgcagctgttggcaatactaacaatatgtagttttatcgggtatgttaattaaactaattttgtgttttcctctttttcttgcattggtttgggagtccaattggatgactggtttcatattggctttggggtgatcaggtgataaactttgaactacctggaattggagggagtgattgctggcaatttattcaggtcacaacttttagtatgttcaaatttgttttttcattgtctttgttaccatatttctgttgtcaaattgtcagtgataatctatatcctgtgctagcaggatacccaagagagtttggaactagccccactacagccttgtacattgatgaagagtcgtgagtgtgcaattagtatgttagcaggactctggtaattagaggtggcctgacaactctgctactaagacttggttattcttatatgtttaattaatgataaaacttagaatccaacctcattacattactatgaatcatgagaacagaatgagaaaaaaatgactttggaagatttaggtggaaaaaaaattttaagaatgtttagaagatcttgtaaaatctcctcaggcatatttaaaaagatgatgacctgttactattattattattattattattttttgcagtgactaattgttcttttggatagtgggggacatcaagatgccctgtccctatccctctggccctgtgtgtgtggtatattggctctgacgtgttaagaaacaaaatttttcaaagtggcaaatcagattctttgcagaattcttgctcaggagcagccatttctcagtgagtttcttgggatctgaagctttgaatgcaagcatgcccatttcttatctccagctgtaggcacaggtcaatagaaaatgcagggctgaaagccacgacaggggtcaggggctagcagagggccaagaaaagtgaatatagaatcaagtcaagcttaacattaggggaaatggggtgatatgcgatctctctgtactatctttgcaactcttccatgaatctaaaattatttcaaaataaaaagtttaaaaatgtcaaagaggaaggtagaaactggaagagcatgtgatgggagcttctggggagcaggtcttctgtttcttgatctgtgtgctgattacacagtatgttcatgttgcaagatttcatctggctgtacgcttttgattagtgcacttttctgtgtatgtgttgtacttgaaaaccaagtttacttaaaaaatgttgtatcagccacagcagccaggatatgctttgaagcctttaaaattgaggcaaaacctgcttcgagttattttttaaatttgtgaactcagttcatcgctggggtcatggaccaatcctggagcccaagtttaccctctctcctgtcagttagggcaaaggctaggaatgtattaatgaccaccgcaccatcacttggtagttcttggaattttacattttctacgttgaagttcagtgatacacctggaatgcttctgagtcacagcattgcctactctgttagccccagactagactctggcttattgactgcctggctctccaggaacacacttaaatttggctgttgtaggcctcttctgacctttaggacagtctcacatgtctaccagttaatgaaggtgagccatggtttcttcagggctgtttattgcaattggcttgcactttccctgcttgttcctgctttggtgctgtccctgccgaactctgaacccttggcactgcccccacaacgttattcctctgggcctttgacttctatatttgcattggtctctttggcattggattcatgattctctctaatggactttggcttgtaacctgtctcaatctgaactgccctcactatgcatgaccctttggaaaccaatctccgatgatttcttcttggctgatgtcctccctcattgggttccccagagaggtggtcaggagtggtattccagtagctacgaccttgatggtggattgaatcatgctcctcattcccccagccactagctagggtccaataatgaataagttgatcacttgaataatgcaaacccttcccttggcttcatgtaatctccactcttgagttttgctattgtgctcttctgtcagattggacttgtcagcgttgatactcacccagaccaggcttgagctaactataccctttggacatgatatcttgaattgatgggtcctctctgaagaagaaccagcttctatagcctggtaagctccttacctcactgatgtcctctcaacaacagctggtattgctggctcctagcacattttgaccttgattccagccatgttctttccaagcaggttaaaggcaagagtatgtgctgagtaggtaaattatgtggtgacttctggagtgcaggtgtcttctcctttctgtcccatttaataagcatggttcccttatcaatgcttgaaaaacctgctctggcatttgtagattctatttccaaacctcctgtaggccccctcccaatctcccattccactgcttcttgctcatggctttctcatggctctgtcttcccttattttgattctaattcccagttctttttccacaccttgcttggctcctggtttcagccactcttttggctttgtcattgatacctttcaaggaaatgatcttgatgttggtcatcctgccccatgtacgggggctgagggtaagaggcatcctgactgtgtgccctaccttcttactaatgggactgaccttacagcaatgtttttcttgacctttgccttccttgttccttcctttccttgttagggtaagtaattttattcatagatacactttggggtctgactgttggagatattttctactttccctgaattttctgggagaacttcataatcagcacaggcttagtagatgagtagttttaccattctgctaagatgcttcattttggtagccttttctcctctagataagggagaaatagggtgataatttgggaaattttaaatgtggaggctgtgtaagactttattgtttggctaatccagtacacactcctgttttgttcacctgctctgtaggggctagaaaagctaaatgctcattactcagccttcctttctcctgggaatggttcccccagtaaagagatgaacacagctgacatcatctcaacttttttcctcctgagaacacgtggatcaaatacctggaggtgaagcatccaatttagaactgcatgggaaaggctaagaagattaccaagaaattgaccatgcaatcattgagctatcagttgtttactttcaggcttcttaggggaaaaagtcttatttgtttaaactaaataaaaatccttaatttgcttaaattagtttaaacagaagtgagttttttttaaaattatttttcagccaaaatcattcccatttgatagagatctggctaataacaaaggtaacacagtgaactgacctagagtggacacagatctgtgctgctgtcctgacatataaactacgagggggaaaattaggcttctttgcccagaactttaggggagagttcatgatcatcgtgagaatgtgggctgcagagctaagcagctgcctaacatgctgcagattgatttatcttagactaatagggaagacaatctgaggcaagtatgatgaggtcacattagcctctattctcttaaaccatatagactcgtggagctctgttagcatgagcttggggcatatcactcttaatggtggtaaaagctatcagctgtcagctttttgatccaatttagcaatttactgtcttctttctcatttacctggcccaaaaagtgtaactgtctctctgaaaaagagagaccctgtgcttacatcttgggtcagtagttctcagtgggggaaggtgacatttcctctccccacccagggaatatttggcaatgtctggagacatttttgtttgtcacaacttggagaggatgctcttggtttctagtaagtagagggcagagttggaactaaacatcctcctgtccacaggacggtcccctacaacagcagtccccaacctttttggtaccagggaccggttttgtaaaagacagtttttccatggaccggtttggaggtgggggtgggggagacggttttgggatgattcaagcacattacatttattgtgtacttttattacattgtaatatataatgaaaagatcatacaattcaccataggtagaatcagtgggagccctgagcttgttttcctgcaactagatgatcccatctgggggtgatggaagacagtgacagatcatcaaccattagattctcatagagcacatgacctagatcccttgcatgcatagttcacagtagggtttgtgctcctatgagagtctaatgctcctgctgatctgacaggtggcggagctcaggcactaatgtgagtgatggaaagtggctataaacacagatgaagcttccctggcttgcccgctgctcacctcctgctgtgtggccaagttcctagcaggccatggactggtacctacaacaattgggcccctaccctacaacaacaattatgcaaccaaggatatcactagtgctggatttagctctgttttagacccataaatcagttgcatgatttgggtttaaatccttggctatctcttagcttctgttcaacctctcttcatagtaactgttgactttgaggaatcccattgaatctgtccccaggactctgtttggtcattgcccccactaggtcagacctcaagccctgaaaaagagatgcagataggagcggagtgtgccagagcagcactgtcttgttttcctagcaaggtctgggagaaagaaggtaagacagaagctgttaggataaagtgtaggatagttttttctgagcagtagaggtgaaatgggatcttgtctgtgtcggataaaactaagaggtccattacatgaaggaattggaagcaggtgaatggctgctaaagctgaacaagaaagggcaattgatgcaaagtagcatgcaaagaaatcatgtagggtggatttacaggaagctaaattaaactgacattgctcaagatacaacactgcacagaaagtggaaggcagggcagaagggagagccaaggagactgggagagtcacagtagtggatggagctacctgtaccctaaagcaagagggctttgaaatggacaaaatgtctgccccagacagcctctcacactctactagggtaagagaataatcactggcagttcagggcctaattagtctctgatttagctgtaaaggcttctgtcaggtagcacttggctgcacctgcaagaccagtagttcttaataggatgaaaggaatttcttctcacccacccaggtctgctctatcatcatcttagggaaattttctgatacactgcatgtcccagaaatcaattttttggttaattggacactttagttaatgcagaattaacatgaggctgtggaatggtggcaagagtcctgggcttagatcaaaggcatagctctgttgctttctagtgaattacatcaattatccaagcttcaggctttgaatcttctaactgggtatcatacgcctgtcctgtctgttagtgataatgcaggaatcaaatgaggtgatgtatgtaggagtgttttgaacattctatattgaaatatacatattgaagatattatattacatgctaagcatgaattgctatcttcaaagaatgagaataaaagtacacataaagttcaaattatgcagaatagattttattctcttatatgatacagaatatttttcagtatcagaggagatggcagagaaaaaaatgtagacatttcaaagtcgctgtccagagttctggcctctaaagtgaaaaacatgaagttgatcctttatttagtgaaatacattaagatgtttcagattatccaaaggaagactaggagtacaggttctagaggtaaacttgagaagagttgagtttcagaaggagccagagagtaaagggagcctagaaaccgagggacagagggtgctgagcgctgttgtgctataaaactcctaactgctcagatcttcagacacctgctacttcctcaaatgacttgagagagtagtgtccactttagggaagacggcaagtgtcaccacagaaaaggggctgagttccagattggtgaggggcagagaaaaaaaagatgctgtaggtgttgggtgtgaaaccagagtaaccaggactcagaactataacacagggtaactcttaaggactcctagttttggcactgaaactttatatctcaggaaactccttagtcctaggcaaatgggaagagttggtcaccctctaagtgtgatgctgggatgggaaaagtcagaatttccagatatctttggaaagccaacggaccctctcaccaggcatgaatagagaaatgagacaattaaaaaaaaatccctaagaacaggatgacatcttgtttgatatgtgtactagaatatttaggttaataaagacatttggttgacatagaggtagaagagagcacaagtcttgctgttttcattggtttacattagttttccctaatgctgggctattgtttctttaattcaccttaaaagaagaatgtattcaaggttcttgtatgtgaaattcagggtaaatgaagcaacatgactctactcatgaatacaagtaaaaagcaaaagccaaaaaaatcctcattttattagaaaatagactttcagaaaagctgcaagaaatagtatatagttcaaagaccaccaatatacttttttccagatgagctattgttaacatttttagcccatttgctttgatttttctttctctacacacacacacacacacacagacacagaaacatagaaattttctgaaccttttgatataagtttgtatgcatcatgctcctttatccccaaatactttaaatatgtatttcctaagaataggaatattcttatacgtcaacttcagtaatttaacactaatatgatgctttaatctaccatgcatattccaattttgtcaattaactcaataatgtccattatagcatttctttttatccttccagtacagaaataaatgtaggctcaagtatttagttgtcacgtctctttagtctcctttaatttggagctttttgcgacatttatcatttgacattgatatttttgaagctacaatcctgtttttgtgtttaacagaaagttccttgttttcggatttatctgatgtttccttgtggttagattcaggttatgcatctttgcttgaatgctgtataagcaattctatgtccttctcaaggtatcacatctgaaggtgcccatctccatctgtccctcactgatgttaattttgaccatccagtcaaggagtttgtctgattatgcactgttgagttactgtttttcctcatattcattctttttttctgtgttatgttttaagtatattttttcatacatccttaataaattctaaatacagatattagcatctcacctgatttcagacctgtactttgcaaccatgggcaggtaaaaagtgtgacatgtttttgtttctatttgcactacaagagaaagttgtatttaaattttatattttatttctggaactgaaccagccttgaagattgctttgtacttgagcagagaagtgaaaaataaaacgaaaaaccaaaaaaaagaaaagaaaaaaggaaacaaatagcccagaataaagcaaccctaccctagttgttctgtctcctccactagaggagatgattgggtttcacggagctaaccattctaagagcagatttcatttgctgcctcttgatgagaatttgactggaagatccctggaaaaatgagcggaaactgggctaacaccttagtggtaaaacaacagaggaaaaaataaatttatcctagttatgagttcgtatgacttgtatcatattgacactgataagcagtgatttcaagcaaaaagtgttggcctaatgttacttcaagggctaatatagacctagaacattcttgctggtgttcagcatcatagactgagatgtagaactgttccacttttctacaacttgtggccttcctgctatctgcattttctattgtcaaatttctcttctacctaataccttcacctacagtgccccgtggtcacccttggctttgattcctggtgtctttttgcgattgcttccttgtggtatgcagttttcatgtgaactgatcactgggaataagccccttgtttggtataggcataagttgtttgatacttgtgtattacccttatgggcagctcagcctggccccatgggcaccagatgaagaagggcatgaactgacaatgccgggagaactacattagatcctaactcctgacacagttgaccttgtgcagttcttctctcccagtgtggacgaaggcaggaaggagaccccctacttagcccccgcatggggatcaggtagcagagaagcaaatttgtgcccccaaagtgtggagatccaacagatcttaagtggggtagttaatgagaggacaccaatcttaggaccaagatttggaatcaaatgggggtcagaacatgaaggaagattaaaaacaggtagaagcagggtagaattagtgagcaggattgttgcttgggctaattctggaggtggggatcttaggttaaatttcagttttagaaagtcagacatgttgggaagatcgggctgggttcatttaaagggaccagcatgcaatagacaagctatgtggagctacactgatgttttggcagttgtctagcgaatttgagcagagaagctctacatccaaggaacaatgtaaaatcaaactcagtggtgagctttacgagcaaggtgactattttaagtgtctcgctgattttaagatttctcacttaaggccaggaatggtggctcatgcctgtaatcccagaactttgggaggcagtggtgggaggatcacttcaggccaggagttctagaccagcctgggcaacatagggagaccttatctctactaaaactaaaaaaaattagatgggtgtggcggtgcatgcctatagtcccagctaatcaggaggctgagggtgggaggatcacttgagccaagaagttcaaggttgtagtgagctatgattgtgtcactgcactccagcctgggtgacagagcaagactctgtctcaaaaaaaaaaaaaaaaaaaattctcacttagaatcttggaatgttggaaaattgagaaagcaaatgctagggaggaacgtcgtctaggttttctccatacatagttgggaaagagacatttggagatattggggcaacaacttatgaataaaaatctacaggattttcctggtcggagctgggaattttgattgttctatatactttcagcagctcaggttacgagcagctatagttatattattttggcaccagcttgtgctattttcctgagcttagttctcacaatcctatgaaataggtacttttgttttcctctatttaaaaatgagaacataagagacatgaagttaagaaatttgctcaagtggccaagctgaggcttaaatgtagggctgttagtcctgtgttctcctgcagtgcttcttaatccatctgagatcaggaatccttacagtataatatgtaagctgtggatgctgtttccagaaaattgtactgtgagcattttatctacagcttcagggggatcaagaccatctgggattcttttgatggacctaaagttaagaacttctgaatatatatatatatatgtgtgtgtatatacatctacaaattttttaaagaaaaagatatgtgtatatatatacatatataaataactttttagtttttacaaaaaagtattctgagtttaaaattgttcatataatgttcatataaacgtttagaatacaacacatttcttttttttttaaattatactttaagttttagggtacatgtgtacaatgtgcaggtttgttacatatgtacacatgtgccatgttggtgtgctgcacccattaacttgtcatttaacattaagtatatctcctaatgctgtccctcccccatccccccaccccacaacaggccccggtgtgtgatgttccccttcctgtgtccatgtgttctcattgttcaattcccacctatgagtgagaacatgtgttgtttggttttttgtccttgcaatagtttgctgagaatgatggtttccagtttcatccatgtccctacaaagggcatgaactcatcattttttatggctgcatagtattcagtggtgtatatgtgccacattttcttaatccagtctatcattgttggacatttgggttggttccaagtctttgctcttgtgaatagtgcaacaataaacatacatgtgcatgtgtctttatagcagcatgatttataatcctttgggcatatacccagtaatgggatggctgggtcaaatggtatttctagttctagatccctgaggaatcactacactgacttccacaatcgttgaactagtttacagtcccaccaacagtgtaaaagtgttcctatttctccacatcctccccagcacttgttgtttcctgactttttaatgattgccattctaactggtgtaagatggtatctcattgtggttttgatttgcatttctctgatgagtgatgatgagcattttttcatgtgtcttttggctgcgtaaatgtcttctttcgagaagtgtctgttcatatccttcgcccactttttgatggggttgtttttttcttgtaaatttgtttgagttcattgtagattctagatattagccctttgtcagatgagtagattgcaaaaattttctcccattctgtaggtttcctgttcactctgatggtagtttcttttgctgtgcagaagctctttagtttaattagatcccatttgtcaattttggcttttgttgccattgcttttggtgttttagacatgaagtccttgcccatgcctatgtcctgaatggtattgcctaggttttcttctgggtttttatggttttaggtctaacgtttaagtccttaatccatcttgaattaatttttgtataaggtgtaaggaagggatccagtttcagctttctacataaggctagccagttttcccagcaccatttattaaatagggaatcctttccctattcttttttttgtcaggtttgtcaaagatcagatagttgtagatatgtgacattatttctgagggctctgttctgttccattgatctactgttttggtcccagtaccatgctgttttggttactgtagccttgtagtatagtttgaagtcaggtagcatgatgcctccagctttgttcttttggcttaggattgacttggcaatgtgggctatttttggtaccatatgaactttaaagtagttttttccaattctgtgaataaagtcattggtagcttgatgtggatggcattgaatctataaattaccttgggcattatggccattttcacgacattgattcttcctacccatgagcatggaatgttcttccatttgtttgtatcctcttttatttcattgtgcagtggtttgtagttctccttgaagggcaaactgaatccagcagcacatcaaaaaacttatccaccatgagcaagtgggcttcatccctgggatgcaaagctggttcaatgttcgcaaatcaataaacgtaatccagcatataaacagaaccaatgacaaaaatcacgtgattgtctcaatagatgcagaaaaggcctttgacaaaattcaacaactcttcatgctaaaaactctcaataaattaggtattgatgggatgtatctcaaaataataagagctatctatgacaaacccacagccaatatcatactgaatagacaaaaactggaagcattccctttgtaaaccggcacaagacagggatgccctctctcatcactcctattcaacatagtgttggaagttctggccagggcgatcaggcaggagaaggaaataaagggtattcaattaggaaaagaggaagtcaaattgtccctgtttgcagatgacatgattgtatatctagaaaaccccatcgtctcagcccaaaatctccttaagctgataagcaacttcagcaacgtctcaggatacaaaatcaatgtgcaaaaatcacaagcattcttatataccaataacagataaacagccaaatcatgagtagaatacaacacatttctgagttgaggtttgctggtgtaaagttttgaagcaaatactatccatgcctcacctgcattttttttggtacttgttgttctagcatattctgattagccctactgtaagctcttaaaatcctacacttgagggttttctaaatctgcagttggggcgaccataagtgttgggggtttaatgatcctgggaatagcaactggccaatgaaatgtgggaactggagggtaaataacccggcttcctcaccccttgagagggacaactctgtggtgggttctgccttgcctctcaatgtttcccaggtggattgagcttcggattccacaagtggaaacctcgttgataacatactctttattgatgttcttcccatctccatctcactttttcacttccctaaccatgtttcttgggaccacattccaaacaaattacctgtactcaaatccttgtctcagagtctgtttctgggggaacgtggcctcaggtaagactgcatatggtgacaatttttaaataacaccctatgcaacacgatgttaatttaagacactcataaaatgacaaagtctagctctgaatgcttttgtcattatggtaaagcctggtctaacctattggaggatgagaaatcatatggaaaagaatgttgccctcccagtcagtacttgcaatcaactgccagatgtcagacagtggccattggaaactatctggcccagcaaactaccacttgaccataaaaacacaaatgaactcagctgacaccacatggggtaaaaaggagccatcccagctgagccctgcccaagttaccagcccacagaatgtctttgaatgaagaggagctgtacccaaacaaccttgactggaatagaacatgctacagatcatgaaatcatgactttgagcctaatagagtgattaaaagagaacttggaaatcttgggagaaggtgagtgtatttcatgtatttcacatgaatcactggggccagagggaggacagtggtagtttgttggaatactggcccccaataaatgatgcctccttgtcttctccctttgcaatgtgactttgtttttcccttcatccacacatggagtctatttccctacttcctgaatctgtgctgcccttgtgactttcactaatagaatgctacagaagtgacatctgagacttctgaagctcagccttaagaggcctgtaatcccagcactttgggaggctgaggcaggcagatcatgaggtcaggagatcgagaccatcctggctaacatggtgaaaccccgtctctgctaaaaaaaatacaaaaaattagccgggtgtggtggcaggcacctgtagtcccaggtacttgggaggctgaggcaggagaatggcgtgaacccgggaggcagagcttgtagtgagccaagatcacaccactgcactccagcttgggtgacagagcaagactccgtctccaaaaaaaaaaaaaaaaaaaaaaaccttgcaactgctactgtcatcttcatggaatgcccctgtcatcatggaaaaagcctggtctaattactggagaagatgagtctttcaaaggagaggcatgacatactggctgaaagccccaggtaactgacaaacatgtgactgagtccatttgggtcagccagccaccagctgacctgaaaactgaccatagatgcatgagtcagcccagctgttaccatgtggaacagagatgagccatcctagctgagccctaccaaattgacaacccaaagaattgctagagggtgaaaagataatgtctacacatagttcttagtcttgctgagtttttatcttcatggcctcttgacaccaagccagagaaataaagatggctccaacatgaaggctgaagaccctgccttggccactgccaagattactttctcaggtccgaacagtctcttcttgcttcatatacctatgacacaggagctgagggtcctttgaattagttacaatgaaggaccattgggcctgtccaattttccctggggttgaaccaaccactgagctaaaagaggttatgtaaagcaaactgacactgataaaggaaaaccctgagtaggactcaggatttttcatggatctgtaaatcttggcatctccttgtaaaactcagagtatgtaagtgaatcatggccctgttgtacttttttcctttgcttttcatattaaacgtcatggaaaatactttatcttaactgagaagaaaatacaaatgagagaaacagaagcaagtgttcatcagaaacaggcaaaaaatgtaccagtctccaagtagcagtgataatttaacttgaaatagtttttttttagggacacttaaagaaaggtggttttgacatatttttctccatcctcttcttctatgtccatcatgagatgtttatattggagcttcaggtagaagagcacgttttgggacagctgtccttactttctgaacatttatcctccttttgtggagagggattaaaatactttgtacatgtgtaatttcagatttcctgttcttctcactttgttttcttcacttgccccctttgagggtagaaaatgctagagaaaaatgttgatttcagatgaaaataatgcaattattgattttctaagctgtctctgaaactattcaactactgatcaatttaagcatattgtatagttcctctaaaaatagtttttcagacttcaaaaatacaagttcatggaggttgttatgttaagtcaaatcagccaggcacagaaagacaaatgttccatgttctctcttaggagctaaaaagttgatctcatggaggtagagaatagaatgatatgtaccagaggctggggagggtgttcaatgggagtgggggaggaagacagattggttaatgggtataaatatacagttacataaaaaggataagttctaatgttcaacagcagagtagagcaattatagttaaccacaatgtattatacgtttcaaaatagtcagaagagagtacttgaaatattcccaacacataaaaatgacaaatactcaaggtgatggataccctaaatgccctgattcgatgatcacacattctatgcatgtagcaaaatatgcgtactcccaaaatatgtacaaatattacgtatcaataaaaatacaaggtcattatatcctattactacatttaaattagaggaaactctgcattgctaaaagttcttctacaaagtgtgtgtatacttgaatactcttctgtttggtacagtccttctagcctgttgatcccaggcagccctatggttaaaagggcagggactatatccagggactataatgtacacataagatcacaggaaatatagtgcagatagaaagtcacactttagccttcccatacttgataatgaaccaatataatggttaactaggaagtttttgcttattcatacacccaaaatctgtttcttttttctgtagttatacttgtggcaggcaagacaaattatgattctattagtatctttgtagaatcttttccactccaaacctctgctaggtaaacttctgggttttctgtttgactttttaccgtcctttcatctgcattcttccccctatccagctaagattacttgagagaaaaaataacaatggcaggtggtgagaaggaggaagggaaaggaagagtgcaaggggtgttgaggcaggcaaggctgtttgttagaacctccttgggagtgtttttaaaatgccaatgcaaggactcctgggcaagatggctgaataggaacagctccggtctgcagctcccagcaagatcaatgcggaaggcagtgatttctgcatttccaactgcgggtacccagttcatctcattgggactgattagacagtgaatgtagcccatggagggccagcagaagcagagtggggcattgcctcacccacaaagtgctagggatctgggaactccctcatttagccaaaggaagctgtgagggactgtgccatgaaggacggtgctatctggcccagatactatgcttttcccatggtctttgcaacccgtagaccagtagattccctcaggtgcctacatcaccagggccctgggtttcaagtgcaaaacggagtagccacttgggcagacaccaagctagatgcaggagttttttcttcataccacagtggcacctagaacaccagtgagacagaactgttcactccactggaaagggggctgaagctagggagccaagtggtctagctcagtggatcccacctcagtggagtccaacaagctaagatccactggcttgaaatttttgctgccagcacagcagtctgaactctacctgggatgctcaagcttggtggcgggaggggctccgccatcactgaagcttgagtaggcagttttcccttcacagagtaagcaaagccatggggaagctcagactgggtggagcccaccacagcaccgcaaacctgctgtagccagattgcctctctagattcctcctctctgggcaggacatctctgaaagaaaggcagcagccctagtcaagggcttatagataaaactcccatctccctgggagagagcacctgagggaaggggctgctgtgagcacagcctcatcagacttaaactttcctgcctgctggctcagaagagagcagtgaatctcccagcacagcacaggagctctgctaagggacagactgcctcctcaagtggatccctgaccccagtgcctcctgataaggagacacctcccagcaggagtggacagacacctcatataggagagttccagctggcatctggcaggtgcccctctgggacaaagcttccagaggaaggagcaggcagcaatctttgctgttctgcagcctccgctggtgatacctaggcaaacagggtctggagtggacctctagcaaactccaacagacctgcagaagaggggcctgttagaaggaaaactaacaaacagcaatagcatcaacatcaaaaaggacaatcgtgcaaaaatcccatccgaaggtaaccaacatcaaagaccaaaggtagataaatccatgaaaatgagaaaaaaacagtgcaaaaatgctgagacttccaaaaactggaatgcctcttctcctgcaaaggatcacaactccttgccagcaagggaaaaaaactggacagagaatgagtttgacaaattgacagaagtaggcttcagaaggtgggtaataacaaactcctctgagctaaaggagcaagttctaacccaaagcaaggaagctaagaaccttgataaaaggttacaggaactgctaactagaataaccagtttagagaagaacataaatgacctaacggagctgaaaaacacagcacgagtactttgtgaagcatatataagtatcaatagccaaatcaatcaagtggaagaaaggatatcagagattgaagatcaacataaggaaataaagccggaagacaagattagagaaaaaagaatgaaaaggaatgaacaaacctccaagaaatatgggactgtgtgaaaagaccaaatctatgtttgattggtgtacctggaagtaaaggagagaatggaaccaagttggaagacacacttcaggatatcgtccaggagaacttcccaaaccttgcaagacaggccaacattcaaattcaggaaatacacagaacaccacaaggatactcctcaagaagagcaaccccaagacatgtaattatcagattcaccaaggttgaaatgagggaaaaaatgttaaaggcagccagagagaaaggtcgggttacccacaaagggaagcccatcagactaacagtagatctctcaacagaaaccctaccagccagaatagagtgggggccaatattcaacattcttaaagaaaataattttcaacccagagtttcacatccagccaaactaagcttcataagtgaaggagaaataaaatcttttacagacaagcaaatgctgagggattttgtcaccgccaggcctgccttacaagagctcctgaagaaagcgctaaatatggaaaggaaaaactggtaccagcccctggaaaaatataccaaaatataaagaccatcgacactatgaagaaactgcatcaactaatgggcaaaataaccagctagcatcataatgacaggatcaaattcatgtataactatattaaccttaaatgtaaatgggctatatgccccaattaagacagactggcaaattgggtaaagagtcaagacccatcagtgtgctgtattcaggagacacatctcacgtggaaagacacacataggctcaaaataaagggatagaggaagatttaccaagtaagtggaaagcaaaaaaaaaaaaaaaaaaaaaaaaagttgcaatcctagtctctgataaagcagactttaaaccaacaaagaccaaaaaagacaaagaagggcattacataatggtaaagggatcaatgcagcaagaagagtgaactatcccaaatatatatgcacccaatacaggagcacccagatccataaagcaagttcttaaagacctatgaagagacttagactcccacacaataatagtgggagactttaacaccccactgccaatattagatcaatgagacagaaaattaacaagaatattcaggacttgaactcagctctgcatcaagtggacctaatagacatctacatactctccaccccaaatcaacagaatatacattcttctcagcaccacatagcacttactctaaaactgaccacataattggaagtaaaacactcctcagcaaatgcaaaagaatggaaatcataacagtctctcagaccacagtgcaatcatattagaactcaggactaagaaactcactcaaaactgcacaactacatggaaactgaacaacctgctcctgaatgactgctgggtaaataatgaaattaaggcagaaataagttcattgaaaccgatgagaacaaagacacaacataccagaatctctaggacacagctaaagcagtgtttagagggaaatttatagcactaaatgcccacaagagatagcaggaaagatctaaaattgacaccctaacatcacaatgaaaataactagagaagcaagagcaaaagctagcagaaggcaagaaataactaagattagagcagaactgaaggagatagagacacaaaaaacccttcaaaaaaccaatgaattgtggagctggttttttgaaaagattaacaaaatagaccgctagccagactaataaagaagaaaagagagaagaatcaaatagacacaataaaaatgataaaggggatatcaccactgatcccacagaaatacacactaccatcagagaatattataaacatgtctatgcaaataaactagaagatgtagaagaaatggataaatgcctggacacatacaccctctcaagtctaaatcaggaagctgaatccctgaattgaccaataacaggttctgaaattgaggcagtaattaatagtctaccaaccaaaaaaagtccaggaccagacggaatcacagccgaattctaccagaggaacaaagaggagctggtaccatttcttctgaaactattccaaacaatagaaaaagggggactcctccctagctcattttatgaggccagcatcatcttgataccaaaacctggcagagacacaacaacaaaaagaaaatttcaggccaatatccctgatgaacatcgatgtgaaaattctcaataaaatactggcaaattgaatccagcagcactttaaaaagcttattcatcacaatcaagtcagcttcatccctgggatgcaagactggttcaacatacgcaaattaataaacatactccatcacataaacagaaccaatgacaaagaccacatgattatctcaatagatgcagaaaaggccttctataaaattcaacaccccttcatgttaaaaactctcaataaactaggtattgatggaatgtatctcaaaataatagctatttatgacaaacccacagccagtatcatactgaatgggcaaaagctgaaagcattccctttgaaaaatggcacaagacaagaatgtcctctctctccactcctaatcaacatagtattggaagttctggccagggcaatcaggcaagagaaatgaagcatattcaaataggaagagaggaagtcaaattatctctgtttgcagatgacatgattgtatatttagaaaaccccattgtctcagcccaaaaactctttaagctgataagcaacttcggcaaaatctcaggatacaaaatcaatgtgcaaaaatcacaagcattcctgtacaccaatagtagccaaatcgtgagtgaactcccattcacaattgctacaaagaataaaatacctaggaatacaacttacaagggatgtgaaggacctcttcagggagaattgtaaaccactgcttaaggaaacaagaggttaccaacaaatggaaaaagattccatgctcatggataggaagaatcaatatcatgaaaatggccatactgctcaaagtaatttatagattcaatgccattctcctcaaactaccattgaatttcttcacagaattagaaaaaactactttaaatttcatgtggaaccaaaaaatagcctgtatagccaagacaatcctaagcaaaaagaacaaagctgggggcatcatgttacttgacttcaaactatactacaaggctacagtaaccaaaacagcatggtactggtaccaaaacagagagatagaccaacggaacagaacagaggcctcagaaataacaccacacatctacaaccacctgatctttgacaaacctgacacacataagtaatggggaaaaaagtccctatctaataaatggtgttgggaaaacaggctagccatatgcagaaagctgagactggaccccttccttaccccttatacaaaaattaactcaagatggattaaagacttaaacataatacctaaaaccataaaaaccctagaagaaaacctaggcaataccattcaagacataggcatgggcaaagacttgatgactaaaacaccaaaagcaacagcaacaaaagccaaaattgacaaatgagatctaatttaaattaaagagcttctgcaagcaaaagaaactatcatcagagcgagtaggcaacctacagaattggagaaaatttttgcaatctacccatctaacaaagggctaatatccagaatctacaaagaactttaacaaattttcaagaaaaaaaacccatcaaaaagtgggtgaaggatatgaacagacacttttcaaaagaagacatttatgcagccaacaaacatgaaaaaaagctcatcactggtcattagagaaatgcagatcaaaaccacaatgagatattatctcataccattagaatggtggtcattcaaaagtcaggaaacaacagatgctggagaggatgtagagaaataggaacacttttacactgttggtgagagtgtaaattagttcaaccattgtggaagacagtgtggccattcctcaaggatctagaactagaaatatcatttgacccagcaatcccattactgggtatatacccaaagaattataaatcattctcaataaagacacatgcacacgtatgtttattgcagcactattcacaatagcaaagacttagaaccaacccaaatgcccatcaatgatagactggaaaaagaaaatgtggcacatatataccatggaatactatgcagccgtaaaaaatgagttcatatcttttgcagggatatggatgaagctggaaaccatcattctcagcaaaataacacaggaacagaaaaccaaacactgcatgttcccactcataagtgggagttgaacaatgagaacatatgagcacagggaggggaacattacacaccagggcctgttggtgggatgggaagcaaggggagggaaagcattagaagaaatacataattatttatgtatgtagatgatgcgttgatgggtgcagcaaaccaccatggcacattatacctatgtaagaaacctacacattctgcacatgtatcctaaaacttaaagtataataataataataataataataataataaatgccaatgcatgggcctctgatttaactcatctagggattggcattttaataaaactgccttggtgattcaactgagcatccggggtatagggccattgaggttgaaatttgattggtgagggcttagaaaggaggcagttccagtgtagctttggcttctgagaagactggaaaccaagatgattaggaagaggatttgaggaagtgttaagtagtagtgctgtgggcgcacttggtttttcaagtcgcctgcttggccctcttccaagttgtactttccttctttcccttccttccttttttttttttttttttttttttttttactgttctaaagctttttaataaactttcactcctgctctgaaaaaaaaagtagtgctgtagattataaattggatctttaatatttttttctgagagatgcatatagaaattaaagttgccttggttgctaatctgtagtctttgatgacaacatcatgatattatggcgagacttttcctcttctggattcaccagtcctctttataggatttaaaatgaggggatctacagagctctccatgaatctgttaagaccccatggttcttacccttcaacaccctatatacaaactccctgcctcccctgactaaactgtccaagagaccagttccaagaaggacataaccagatctgattatccacctcctcgtaagccagtgttttccaaattatagagtagtggaatcaattccatgtcttgtgacctgcgtgttgtccttctaatgaaaacaaaataaatagataaggaaataaacagattttaaaaacaagctgtgtgacagatagtaaagacaggtatcatttgttaaaatctttgtttcatcatatgtacattaatgcagcatttcttatatttttatgtttcttagtatttttaaaatttaaattgacaaaaattttatatatttacattatttgctacggtttgaatatttgtgtctctccaacattcatatgttgaaatctagttctcaatatattggtattaagaggtggtgcttttgggaggtaattagttcatgatggcagagcccacgtgaataggattagtgcccttataaaagaggtttgagggaattcttttgcccatctgccatgtaatgactcagcaacagggcaccgtctatgaagcggagatctttcaccagacattgaatctgctgttgccctgaccttgaacttcccagcctccagaactgttgtttataaattacatggtctaagatattttgttatggcagcccagatagactaagacagtatacaacatggtgtacaatgattgtatgcacgtggtgtacaacagggtgtgtgtgtgtatatagacaatataacaatatattgtatacttgaaaattgctaggagagtagattctaaatgttctcaccacaaaagaaatgttaagtatgtaaggtaatggatatattaattagcttgatatagctatttcatagctaaattatacattgtaaatgtgtgtgtgtgtatgtgtgtgtgtgtgtgtgtgtaagttcaagatcagggcactggcagattcagtgtctggtgaaagctctctgcttcatagatactgccgtgttgctgagtcttcacttggcagacagacaaaggaactccctcaaacctcaaacctatatatatgtgtgtgtgtgggtgggtgggtgggtgggggtatacatatcatgtctaatgtataacttagctatgaaatagctaaattaagctaattaatatatctattaccttacatacttaacatttcctttgtggtgagaacatttagaatctactccccaagcaattttcaagtatacaatatattgttattaactatagtcagtaggttgtacaatagatctcttgaacttattccttctgtgtaactgaaatttggtatattttgatcaacatttcccacaaacccctcactctcagtctctggtaaccaccattctactttctgatttcgagttggactttttcagattccacatataagtgagatcatgtagtaattgtctttctgtgcttggcttattttacttagcataatggcctccaagtttatccatgtttttgaaaataagaggatttccttatttttttttttaaggctgaacagtattccattgtgtatatatgccacatttaaaaaaaatccattgatgggcactcaggttgatttcatggtgggttagtgaataacactacattgaacatgggagttcagttatttctttgacatacagattttatttcttttgcatacatacctagaagagggattgctggatcatatggtagttctattttgattttttttttttttttttttgagacagagtctcactctgttgcccaggctggagtgcagtggcaccatcttggctcactgcaacctccgcctcctgggttcaagcaattctcctgcctcagcctcccaagaagctgggactacaggcgcctgccaccatgtccagctaatttttgtatttttagtagagatggagttttgccatattggctaggctggtctcgaactcctgaccttgtgatctgcccgcctcagcctcccaaagtgatgggattacaggtgtgagccaccatgcctggcctattttaatttttttgaggaatctccacgttgttttacatgatgtctgtacttagtgttgctatgaggtatttcttttgctgaatttcagtcagaagtgattgaaagccactgccctaagtgaccacaaggaccagttgcatcatacccttatgtgtgttaccccacttaccaagactttcaagcttctcatttgacccattttcacctggactgtcatctacttaagggtctgtacatcccccagtttgacccaatatatcacccctttaacttctcagacctttccactctgccctttggaactcattggtctgttaatagcaaaattcccagcattctcaaactctctttgtaacattacttctttttcttgctctatatgaaaactgactctcccctgaagccactgattcccctatatcctctcatgtggcttttccttcccccacttcctgccaactactggtcctgaaggtactgtctgttcctcatgctgacttccagaccattgtttcttctgcatccttaaagaacccagctccttcagaccataccatccactgcccgtcattgttgcagtcttcttcagttctgatggttaaacttatccattgaaaattagaccaactggccgggcgcggtggctcacgcctgtaatcccagcactttgggaggtcgaggcgggcggatcacaaggtcaggagattgagaccatcctggctaacatggtgaaaccccgtctctactaaaaatacaaaaatattagccaggcatggtggtgggtgcctgtagtcccagctactcagggggctgaggcaggagaatggtgtgaacctgagaggcggaggctgcagtgagctgagatcgcgccactgcgctccagcctgggtgaaagagcaagactccatctcaaaaaataaaaataaaaataaaaaagagcaactgtttttgcttctttctttccatacctagtcctaccgtcattcttggtattttcaaaatccacatggatcacccatccaatgtcctggcttctcagttccttggctacctcaattccaatgattgtgtccttcaccacactcagtcagacattgtcatggtcatacactagacctgagctgctcaatacaacagtaactacccacatacagctttctaaatttgaaattaataaaatacaataaagattagtccttcagtagcaccagccacattacgagtgaccaattgccatgtgtggttagtggctaccatattgaacagcatagatatagaatatttccatcactgtagaaagctccatagaacagtgctgcactgagaccttgtcattacagtttcaagtattgtacttagactaccatctcacatcattgcagttaactccctcacatacctcaccctaataactctttgactccactcagaccttcaatccactaatctcaacactttccattgtccattatctttctcatgcccccactttccctgttacccaacttaaatttcgaggcccatatttgtagccctttgcataaagcttttgttatggagcaactctcttgctcctatttccccctgtcttactcagtaagacaaacactatcccaggttaactctctcctcctacactgtatctgcactcaagaagctgaatgtagctgaagaaaaattgtaactgtaatgactgacctgaaattcatgaccacaaaacaaaaataccaaacacctagaaataaatctaaaagactttgacaaaacttgtacctagaagatgaaaaaaattaagaaaaaaatgtaaaaacaaatagatttaatatgttcatgcaaggaaaaactcaagattgtgaaaagtcaacactccccaaattgattatataagcaatgcagtctcaatacaagttaaaactttgttcttttcaaattgacaagctggttccagtgttcatttggaactgcaaaaggccaggaatagccaaggtgcttttgaataagaagaaggtggaggctttgttcaagacttaatttaaaggatttaaaaactcattctagagctaaataatttacagtgttattatactagttaccaatttatgacttttagctccaaatgcaccgttctttgctctgctttgtgatagtagagctggaccctggaaacatttcaatgccaggtggcggaatgttagcctttgtcggtagagggcactggagggatactgcaaggcatagcaggaggaggaagagggtgtttctttaggttctaggatgcttttcttcctctgatcgtgtggctctcagcagcttgcagaagactcagtagtgcccaccttccagcttgttctgccagcctcccactgggtaccttccagcttgccagcattggactgtagcaccatggccagtcactactccctacttttactatttctgtcttccttagagtgttctttaaattctgttagcacaaaactacctttcactagttaataattctttttaaaaaacttttaatttcaggggtacataagcaggatgtgcaggtttgttacacatgtaaatgtgtatcatgggggtttgttgtacagacttatttcatcacccaggcattaagcctaatatccattagttatttttcctgatcctctcaccccttcaccctccaccgtctgataggccccagtgtgtgtcgttccccttggtgtctacgtgttctcatttagttcctacttataagtaagaacatgtgatatttggttgtctgttcctgtgtaagtttgccaaagataatggtctctagtttcatccatgtccctgcaaacgacatgatctcattcttttttatggatgcatagtattccatggtgtatatgtaccagattttctttatctagtctatcattgataggcatttaggttgattccatcactttgctattgtgaatagtgctgcaatgaactatgaacttatacatgcatgtgtctttataatagaatgacttatattcctttgggtatatacccagtagtaggattactgggttaaatgatatttctgtcattaggtctttgaggaattgccacactgtttttcacaatggttgaactaatttacactcccaccaacagtgtctaagtattcctttttctctacaacctcaccagcgtctgttgttttttgactttttagtaatatccattctaactggtgtgagatgttatctcattgtggttttgatttgcatttctctaataaggagtgatgttgagcaggagaatggcgtgaacccaggaggtggagcttgcagtgagctgagatcgcgccactgcactccagcctgggggacagagtgagactctgtctcaggaaaaaaaaaaaaaaaaaagaaagaaaattagagcaactgtttttgcttctttctttccatccctagtcctgccatcattcttggtgttttcaaaatccacatggatgacccattcatatgcttgttggccacatgtatgtcttcttttgagaagtgtctgttcatgtcatttgcccattttttgatagggtggttagttttttcttgtaaatttgtttaagtttcttatagatgctagatgttagacgtttgtcagattcatagtctgtaaaatttttttccccattctgtagtttgtttacactgtgtatagtttcttctgctgtgcagaagctctttagtttgattagatgccatttttcattttttgcttttgttgcaatggcagagcctgcctggcctctgctgtttgttggacacagcaaacatgcctctgcctcagaacttctgtgattgcttattccttgcttggaatgttctgtccctggatagccgcatggcttatttagttctatgctcaaatcgccattccttaaagggactttccctctaaaaagaggaaaatcaaaaatattatttccaggtgttctttagcaccttacattattttatatttcttcatagtactaatctttaaatatttgtgtgtttgctattggttatttccctcttaaaatggaaaatccatcaggagacacattttgttttatttaatgctctatgtccagcacttagttttcaataaatatttgttgaatgaataagtaaatgaatgcatgaatgatactgacactgagtcacgtgggccctaggacttatctgggttacatgcacatattcacatattctctaagctactgttttagactcactgtaggggaagctctgctgcttactggcattgggcttttcctctaaggacacctattttagagactgacttccattatattgaagattttaaaacttgataatgaaaatgtaagtcagattatttcacttccatgcttaacgtctcaaataatttccaagtatggaataaaattcaaactcctttctctggcctaatagacttgaccctatctgtcctcttccaatcacttttctgacctcttctccttgtaatcttcctctcgctccttctcctttaaccacacttggtttcctcttctttgaacaccaaactggctcattccatattgtctttaaacttatctttccttccgtttagaacactattcccagattttcatttgcttaatcctttgtcattcagtgcaaacatcaccttgccagagagatctttattaccaaggtagctctctcctttgtaccatcttgctttatttttccaaggagcacttgtcactccataaaaattatctggcttttaaaattgttgattctgtcttccgtcttgggcagaaccttgttttgttttatttgctagtatattcccagtgcctagataaacagtgtgtgatacttaataggtgtgcaataaatattagctgaataaatacagatactccttgacttacaatgggattacaacctaataagactattgcaagtcaaaatatcttaagtaaaaaatgcagttaatacacctaacctactgatcatcatagcttagcctagcctaccttaaatgtacccagaacacttacattagcctatagtagaacaaaataataaaatacaagtttattttataataaagtgttgaatatcttatgtaatctgttgaatactgaaagggaaaagcagagtggttgtttgggtactctaagtacgatttctactgaatgcatattgcattcacatcactgtaatgtcaaagaatcaaagttgaaccattgcaagctggggaccatctgtaaatgcttcatcagtatcattcaagggatgaaatgctagccttaggtgaaacgtagatgcccttagaaataatgtgagcactttggggaacttcctgtttgcaataacttaaaataaattgacttcacactcgctcatactttcctacaaaagcctttcttggttaagaaagaagacattaatttctagttgctgattataaataaggtatgttttgtcactcatattcttcctttgaaaactgtttttactatgatctgctgcttatctgagtcttccccttttgtgattgcatgtaggctagtatttgcctctcgtctacagggtctttgcacttggcttctggtttatcagaggcaggcagtccctgctgctgttaggaagaaaacgattaatcttatttatttattttatgtattatttatgtcccacctgcttcaaaagtgaatttgaggcggctaacttcttaattacttttgcccttgtcctttgaaacttctaggccccgtaaggtttcttagcagtgccactgggtctttgatttcttcttgaaaagtacaatgttgggtgtgtggatttggataatctctgggatcttttatagttgtgacattttgaacctcccttcacaaaagaaagggagttaatgaccagtcacctagggaggctgcataactcacccactttttctcctttttggttacgtctttaccactttcagttatacttcttaggatactaagtttgaaaggtaatgtgtatatatatttccttttttttttgaaattaaaatgtgaacttttaagttgttatatgtgaagcttataacaccatttattgagcacctgctattttccaggcaatactagttttcttatttaagttatatcatttaatttgtacaaaattcctattatgtagatattagtaacccccattctgcagaatagaacaactaaggatcagaagagttaagtaacttatgtaagataaaataatatggggcaggaccatgatttgaatttggctctaaccagtccataaatcagatactctgaggctggcctctgcagatgtatatactcctctgggtgtaaatcgtagaaggagagaaattcaatcttagcattgggtttgggatgactaagggaagcaaaacagctgtggatagaaacactgcctttttgttgccttttctgcttctgggttatacatatttgtgaaaatacatatatgatacaactgttatggcaacaataggtggatggatggttagatgggatcacatttgactgggggtcttaaaggtttcaaaaggactagctcagtcaacagagtggaggttgaggtaaagaatttgctttccagacagaacaaatagcatgtgtgaatcccttaagatgaagtgcacttggaaacgatgacaagtttggtagaaccagagtgtagactctgactggctgcacatttgagaaaggcttggaaatgagcctggaaagatcagcagaggccaggttatgaagagccttttgtacttcactaagtatcttggcatgggtcccataagtggtggaggatcattgaataattgaagaggagtgatgtgatctggcttcgctttagaaagctggctttccttgagtgttgtctctatctcttaggacctgactagctattgttggccagttatgagtattccctttggagaatacctcattttcttgtgggccaggattctcactgtgttacccagggcctgtgtatggaaggcgatacatcaaggacaagcaatgtcagagcctgaatgggaatctgtggatggaaggccccaaaactcagtcttgaaaggcatttttctattgctcttacgattataagggaggctatctttgccttaaatgttaaggtattctgtgagtaaattttctgctagacgtgaatcaatgccaatttgaattcatacaataaactctggaaaacagaattcaattatggttctctttccctgcatagctaaaaggagctgaatactttgcctcatgttcagacacctggagggaagagtggacagcttctggagtgaaaaagaagggaacagaaaagggacggagaccttgaggcagaggttttgtctgtagttcctcaatacccagacaggattctaacaccaagctcaacactccccaggcaatgcttttaaaatgaaagtgtaaccaacatttgttaactgcttgtcaattgggaaaacattttctaaatacatagcttaaggtgccttgcacagtgcttgttgattatcggatactagaaagtacggttaaaaaattcttaaaaagttacaagttgagagttaaaaaaaattaatcttatttttcattttacgaactcattttagattaaaactgtgaagttactgaataataaattttttttaagactctttccccagtctgacaaaacatgccaattctgttgtaaaagctatatgtgacggggaggacgatagcccagtgatttatgggctttggaatcagacaaacataatttagaattcacctgaaacttgagtgtcagctgggtgtggtggcttatgcctgtaatctcagtgacttgggaggctgaggcaggaggattgcttgagcccaggagtttgagaccagcctgggcaacatagcaagacctcatctctacaaaaaattaaaaaagatttaccaggtcatggtggcacctgcctgtagtcttagctacttgggaggcttaggtgggtggatcgcttgagcccaggagttcgaggctgcagtgagctatgacagcatcacttcactccagcctgggcaacaaagtgagaccaagtctgggaaaaaaaaaaaaaacaaccgaaaacaaacccaaacagaacccaaacccccaaaacaaaaaaacttgagtgtccttgggtcaatcatttcatctctgtaagttttagtttcccatctagtccgtccccacttctgatacatacttctagttctgacactgacttgctcgaccagagctctcaacatttatcttggactcctgatacttccattttcagtttatctttctaccttgacattagtgcttgtagacgactggtaataaccctttctccttccatcatctcccaactacctcctgctctggcagggcctaagacctccttccttggaaactgcctgtgattgacagaataatgtcctcccttcctccccacaaagatgttcatgctgtcattttcagaagctgagtatcttatgttatacgataaaggggaattaaggttgcaaatggaatttaggctgccaatcagctgaccttgaatggggagtttatcctggattatctgggtaagtccagtataatcacaagtgtctgtactagggaaaagggggatcaggggagtcagggtcagagtaatgtatgtgagagacttgaatggccaatgctggtattgaagataaaaggggctatggcccggaatgtggggaacccacctctagaagcggggaagggcaagaggacagagtcttcctgagcctcctggaaaaactattctgccaacacttggatttttgcagagtgagactctgtttagacctctggcactgtaagataatacatttctgttgtttcaaaccactaaatttgtggtaatgtgttagagcggcgataggaaaccaacactctgctcttttgggtagaccatgtgccttctggtagatcagctcagacttaagaagacaagttaatatggatttcagaatatttccaaaaagacctgatacacaggcaatttaggacaaataataccaatccaatgctcaccccagctatccagtcccattttgaagtggagagcaaaaaaccctttatggctttttattattctctgctaaatacttgggttaatcttccatattttgcctgctgcttttctctttctctctcttcttttttctttctttctctcttcctctttttctgtttttttctctctctttttctctttctttctctctctgctttagcattttaccataagcactacatttttatcttacaaaaatatttttaaatgatttaaaaaaggatcatgttatgaagcatagaatgctaagggaggtttttaaacttttaatcttcttaagtaatggtccactttatcaactgaaatgtgatgtgactacataatatatataacagatgatgggaaatggttcaggtagaaatggattgatgatggggaggggagaaggtccccagtgttcagcctcattgtctgtggtccctgaagcatcttgttggagctccagagaaactgttgttctagatctgagctttcatttgacagctgggaacacagtcagtgcaagagcccatgaccaggtaatgccaggatggagtcttgaacctgggcctctaggcctggctctcagactgtgttctttccactaaaatacattagcctaaaaccaaattcttgctttgtttgatttttttttttcctcactgatatggtgagagacacaggtgttttctggtgggtagatggcagggtatttttcatccaggaagttcaggcttcatcatgtatcagctactaaaataatttctgaattctgctacaaccattctatagatgaggaaactgagattcagaaagctgaagtgacatacctcccatccatttccagctcagatctcaatcagaaagtgtctctgctcattagaggtgatgaaaaccctcctctgtcacagtggaaggctgtgccacctccctgagcactctggttaaaaaagaaaaagagagaaatatgagtatttcttcctgataggaatgcacacagccaatattttgtgcttgttggattacattagaggaaaatgttgccttctgcggaaatcaatgaaaaatgactgaatccttaaggatttctctttgagcatgtggaattagttatgaaggcctatagcaagaagccaacgtgggaaacaggtgatcctcaacatcgaaaggaagaaggatccatcctaggccagcactgagagttatcatcacctcttcctgaagagtaagcatagactagggtcaggactcatgtctttttctagtccacttaatacacattcacgttgtaagtagttttattccagactaaggctctaatcactctgcacaaatccaccctaggcattgctgtgtctcatatcagggctcatgctcgcttagtacacacctctatgccttaccagtaggcatctactctgactggccagggctgatgccataactgtcattagagattctgaatattatccatgatgtaaataccgggatcagtcaagtttctagtacctatagcgagccgagctaggtaagcagggtcacttagagaattccttctcagtaaaatttattttgatgtgggtgaactattaagcgatggatcccgaattccaacccctttctaaccggcttccacggccgtacacttttcagcacatagtactgctgcatttcaggtgatgaaaagcatttttcaatttgatggttttcatctgcattttattagtctatttctggaaaacacactatttgtacatcactttgcttgcagacttgtctttattattcctttccccacctcacgtggtgggcccaggatctgattttctctcagctcttggcctatttctcattctctctcggagcaatttaccctctgtgacagtccatctgtctctcctgcccccacttatgaatactctgccttttccaattttccttatttcctctttaatatcatctgtgtagtcttccctgaccttttccagctcttcagatggcccatttattccttatcgatgctgtttgactggcggaatcttgcagattatgttgacagtgtttctctcatatcttgccctgtcgtcactctttgttaactgtcttattgaccttttgtaggggtttgtgtttttctcttattaaaaataaaaaaaaaggaaaatggcaaacattaaatgtgcagccgtgatctgagtgttaccatttgagagctcatctgagtgtctgtgttatctgcttctgggctgtgtgcctgctgaagttaatagaagggactgtgtggacttacgcccttcagtggccacctctgaagattgtgggggattgtttgatggtccttgttgatgagtgtcaccaaaaagggaagtagatggttaaaaaaatccttagccaaatgaaatttaatagtttaattgagcaaagaacgattcatgaatcaggcagcctcctaagccagagtaggctcagagagactgcagcacagccttgtggtagaagatttatagaaggaaaaggaaagtgatgtatagaaaatggaaggaaggtatggaaacagctttatgggttacagcttgacttttgccttatttggacacagtttgaacagttggtcccctttgaatggagaaaacctggcgattggcaccagtgtgggttacagtctgtttacacctccatttaggttattgttcactatgtacagagaaatctttaggatgaacttaaaatacgtaaggaaggctgaggcaggtggattgcttgagcccaggagtttgagaccagcctgggaaacatggcaaaaccctcttgctacaaaaaatataaaaattagcttggcgtggtggtgcatgcctataggcccagctacttgggaggctgaagtgggaggattgcttgagcccaggaggttggggctgcagtgatctgtgattgcaccactgtattccagccttggtgacagagtgagatcctgtcttttttttttttttgagacagagtctcactctgtcacccaggctggagtgcagtggtgtgatctcagctcactgcaacctccacctcccgggttcaagtgattctccttcctcagcctcctgagtagctggaattacaggcacacgccaccatgcctggctaatttttgtatttttttttagtagaggtggggtttcaccatgttggtcaggctgggaccctgcctttaaaaaaaaaaaaaggcagctttaggctaaacttcatttaacaacgtttactcgtttgcattatggatcagcaaaccctttctgtaaagggcctgatgggaaagattttcagcttctcaggctatacagtttgtgttgctatagcacaaaagcagtctaagacaacgtgtaaaggaatgggcatgactgtgtttcaatacaactattcacacaaacaggcagtgggccagatttggttgagggacctttgtttggcctctgttttcatttttattttatagcttttactttttcttggctatatgtgcttttgcctttgctgtatttaaaagtgctttctcagcaataagttagcattccatcctgggatactttcagaggtcaccgtgagagggagagagcagcagggaaaagggagtttagtgcaaggagataccacgtgctgtttttggcattgacagagggtccctcattcaggcccactggaagaagtcagatgcgttgtaagttggagataacctgagttgggagaggaatttttttgttaattattatatttaagttctgaggtacatgtgcagaacttgcagttttgtttaataggtatacacatgccatggtggtttgctgcacccatcaatccatcacctacattaggtatttctcctaatgctatccctccccctagcccccccactccctgacaggccccagtgtgtgatgttcccttccctgtgtccatgtgttctcattgttcagctcccatttatgagtgagaacatgcggtatttttatttggctgtgatcctgaatgtcttgctcaggagcttagtaaacttgagtaagtcacttcatgtttttggattttactgatcttatttgtaaaatggggtcattattattaattgttaaatgtaatattctatactgttttatttcacatctctaattatcagttgctggctggcacaaggacttatatcttgagagcattgttgtcttctaatatctcaaggataatgtgtatgaacttaattgaaatattagacattagaaaatacagacaaatttgaagataaaaaatgcacaagacccatgataattgtaatatcacagtgtatattttcttctatatttttctgtaattatatatcgtatataatggtgcatattttgaaaatggctgtttttcacttattataaatttattatcaatgaatattcatcttatcatttctaatagctaagatatcctatttttatatacagaatattttatatactgcatgtgtattcattccttttgctccataaagacaatgacattgtcttgcctacctgtgaaccagacttcagttggaggctgtatagagtaataatttagagtagtgggctttgaattcagatagatcttggcattatttctggatttaccacttataagtgttaacctcatgaaatggagaatgatgaagttcattaatttggaaaggagagctttacttctcataaacggttgtagcttgcagggtggccattctaacaggctgggaagcatagctttgggctagaagccagtaacaggcactttgagggaggggcaaagggaatgtgaatttatgctgaatgaagtggccaaatatacatatttaataagctgcaggaggaattatgaatgtttatgaaatgagaaacacgtgcacgcacactgagcttcatgtcactctctgggtcccacgtgcaaaaatgggcagcgttagcatgacctgagggtggagttttcatccctctgacatcaaagagtaaagcagaggacacaagaacccttgctgcatgtcctctgtagactggcaagaatcactccatggtcagtggtctcttattaggaaggagtgctggttggttgtgtggaaaccccaaaatggttgggtagcattaggttgttggttgatatcagtggtggagtctttcaaaagagtcgatttctgtttaacccttagggaagaaagcctaatggtggttagccagggaggaggtataacaaggcatgtctgatctctcatcctgttgtggctgggcattcaacttccaaggtttctctgggattgcctttatttttatttatcaatttatacagtttggatatttgtccccacccaaatatcatgttgaattgtagtcttcagtgctagaggtggggcctggtgggaggtctttgaatcatgggggtgatcctcatggcttggtgctgtctttgtgatagtgagttcttgtgagatctggtcatttaaaagtctgtggcacctccactccaactctctctctcacttgctcctgcttttgctacatgatgtgcctgctactcttacgttcttccataatagtaaacttcctaaggcctccccagaagctgagcagataccagcaccatgcttcctgtaaagcccacagaaccatgagccaattaaaccttttttccttataaattacccagtctcggctatttctttatagcaatgcaagaattgctgaacacagaaaattggtactaaagagtgaggcattcctctaaagatgtctgaaaatgtggaagcaactttggaactgggtaacaggcagaggttggaagagtttagagggctcagaagaagtcaggaagatgaggaaaatttgcaacttcttagagaacgggttaaatggttgtgaacaaaatgctgatagtgatatagatggtgaactccaggctgatgagatctcagtcagcagtgaggaacttattggaaactgcagcaaaggtcacacatgttataccttagcaaataacttggctgcattctgttcatgccctagggatctgtagaagtttgaactaaagagtgataatgtagggtatctgctgtaagaaatttctaagcagcaaagtgttcaagatatgacctggctgcttccaacaacctatgctaaaatgtgggacctatgctaaaatgtgggagcaaggaaaagacctaaagatggaacttacagttaaaaggggagcagaatgagtttggaaaatttgcagcctgaccacatggcagagaaagaaaacaccttttagggagaggaattcgaggaggttgaaagcaaccacttgctggagaaatttgcataactaaaaaggagccaagtgttaatagccaagacaattggaaaaagacctcaaagacatttcagagacttttgtggcagctctgccattagaggcctaggagggaagaatggttttgtgggccagggccagaaccccactgccatgtacagccttgggacattgctcctcacaatcagctgctctggctccagttgtggctcaaaagggcccaggtacagctcaggtttctactttggagaacgcaagctgtaagccttggtggctttcatgtgatgttaagcttacaggtgcatagaatgcaagagtgaagagtgcttggcagcctctgcctagatctcacagaatgtatgagaaaacctaagtgcccaggtagaaacctgctgcaagggtagagtcaaacagaaatgtggagttgggggccccacaaagagtccccagtggggcattgcctagtggagttatgagaagggggccaccattctccagaccccagaatggtagatccactggcagcttgctccctgtccctggaaaagccacaggaactaaataacctgtgacagcaggcttggaggctgaaccctccaaagccacaaaaatggagctgctcaaagctatgggagtcacccccttccaccagtgtgtcctggacgtaggacacagatccaaaggagattattttgaagctttaagatttaatgactgttctgctgggttttgaacttgcatggggcctgtagtccctttcttttggccaacttctcccttttggaatgtagaagtttacccaatgcctatacctccattgtttcttggaagaagtaaccaacttgttttggattttacaagttgttaagtggaagggatttgccttgtctcagatgagactttggacttttgaattaatgctgaaaggtgtgaagactttgaaggactattgggaaggcatgattgtattttgcaatgtgagaaagatatgagatttgggaggagctcctggcataattgtattttgcaacatgatataaaattctaagcacccctaaccatctgaatagatccctgctgttgggcaagggcatccaaagttaacttgaaaaaacaatttcaggtcatgatgagaagggggagccagacatgcatcattgtacccactttccttttggaattactgattgaacagactctttacgcctgataagaaacatttacgatctattctctctgaagcttgctacctggaggcttcatctgaatgataaaaccttggtctccataacccttattgtaactgagacattacttcctattgataataattcttttaaccaattgccaatcagaaaatctttgaacttatctacgacttggaagttcccactttctgttgtccctttccggaccaaaccaatgtatatcatacatgtgttgattagtgctttatgtctccctaaaatgtataaaaccaaattgtgacccaaccaccttgggcacatgttttcaagatctcctgagggctgtgtcatgggccattagtcactgatattttgctcagaataaatctcttctaatattttagagtttgactcttcaccaacagtgagaggacatgagatttgggagggactaggggcagatatccaaaatagtttggatatttgtccccgcccaaatatcgtgttgaattgtaatcccccatgctggtgatggggcctggtgggaggtgttttgatcatggggacagatacatcatggtttggtgctgtcctcatgatagcgagttcttagaggtctggtcatttaaaagtgtgtggcacccaccctgtctccttcttgcttactcctgctttcatcctttgccttctgctgcaatcaaaagcttcctgggcctccccagaagctgagcagatgccagcaccctgcttcctggaaagtttgcagaaccatgagccaattaaacctcctttccttataaattacccagtcacaggaatttctttatagtgatgttaagaatggcctatacatcaacctaaataaaaagagagaggttctctaaaagtacatgatatttatttgggagtagggtattgcaatgtgaatatacatgccctagtattcagggaagtaaaagaagacaaagggttttaaagaaaacatgaggagaattacataactgttttgagataattatccttggctacaaggattaataacaagagtgacaccagtctgagattggacagtctgttactgggcagatgtccttgcagaagtatttttttgtgtaaagttacggcctttgtgcaaggttgtgtttttttgcaggctttgtgacagtttttgttatcagccatttatgcatgagaattctcttttcatggccttccacatttctatttgtcagggctatttgacacaaatgaatgcatttttattctgacaactttcatataagctatatgattttagagaatttacttactcccagtttcaccagctatataatatataataactccaacttcatagtgttgtgagaattaaattataaagtatgtaatgttcttagtatagggctcaaacacagaatagttctgccttcactggtaagtataatgaccattcatttattactgcaataacatttactgaatagctatagagtttcagtcactatgacaaattcatacgctgaaaaattcgaatatggcctcatccctaccttgaagaagctctagataattaaaaacacagttatagaacaaggagataagagcagcaaagttgagggatgcacagggagtggggaaggagatggtgcatagccttcctaggtgacgtgtcatatcagggacacaagtatcatgcacttttaggcttgtctttacttcctcttttcctcatgcagcagaaatgtagtataacaaaaaacacatttggtctttgttcctggttctgggaagagagcttctaaatctttggaattttctgagtggtaagagtgtcttttgttactcataacaagcactttttgattatacttcagtttatgctaatgagtgatttcgggtggtgaatcctaaacagcctctggataggtctggctaccagaaagaccagatggttagagagtagacactttcggctccacccaccaactttcaggaaggagaatagagctggaaataaagctttataaaaactcttgaatgacaagctctgatgagtttccaggttggtgaacacatggaggtgacgggagggtgggtgatgtgcccaaagaaggcattgaaggaagccccatgcacccctccacctccatactttgccccatgcatctcccatctggctgttcctgagctgtatcctttataacaaacctgtaaaaataagtataaaatgtttccttgggttttgtgaaccattctaacaaataattgaacccaaggaggggatggtaggaagccccagtttatagtcagttggtcggaagtataggaggtcaggacttacaactggcgtctgaagttggggcagtcttgtggagtgagccttcagcttgcaggatctgatgctaacttaaggtagtgtcaaaattaattaaattattggacgcccagttggtatccagagagttggagaatttcttggtatacatttggtgtctgaagtgttgtgtgaatggaggaaaaactttttacagaagaggaaatcaatttcttctagcaccactggtaaggatgcctgtgtcagcttcacaagcatgtctcctatgtgggtgctctgtgacttggagtatacctcctctatccctaatttttatctgctggagacacattgttcaaggccaagagattcagccttatgaaacctgggccagcccaggttggccaatgggccatgaatgacctgacacaacagtgttcatcagatagaaacttcaggttgagtatcccttatccaaaaggcatgaaaccagaagtgtttcagatttcagattttggaatatttgcatgtacatactgagatatcatggggatgggacacaagtctaaaaatataattcagttatgtttcatatatatttatatatacaaagggtaattttatataatattttaaataattttgtgcatgaaacaaagtctgtatacattgaagcataagaaagcaaaggactctatcacatcacccatgtggatgatctgtggttgtttgacatcattgtcattcctgactgaatttatatgctaccataaacaataattttcttacatttactcacccgtaagtacttaacattagaaaacatgacatgctattaatagggtgaaaaaataatgtgttcaggataactaagcagcacagtagcattgccataatacctgcatctactgttaggcatcagcagcagctgacaagagcaggctttcagtctccaccttcgatgttgtgttttgacttaagttattgtgcattgtatttcatttttctttgctgagaagaaacatcagaagcagttgagggaccaggacgtgggtcacttgggatgaggaggcattctgctggatgggatttaaagctgtttcctccagaatcacttgcttcatgaacaatggtttttatcttagaagactctctttagcttaaactgacatgcctctgttatgaacacatgctgctctagtccttcaataagcccagtacatattttctccatgttgtctatgggcactttttctgcagtgttaacaacgtcatctttgtcactgttatctcaatcaccttgatttacaatcacttttgctatttcaccatcggtcaatgaatgaacaactgtaaccttattattaatgttaaaaacttctttgatatccatttcttccggcttactgatggactccgaaggtatgttttttgcatatgtaaggaggttagacatcatgttttcctcacttgacatacagaatccttcaaagtcaccaccttgttcatcatcatcactgaatgtagttgcaggccagagcttgtgccaggcgtgctcaactgtgtctttagtcactgtgttccaagtattccaagtattggcaacagcatatatggcatccttcatgctaaactccttttgaaaacctgtcacacccatgcctctcttcactgctgttagcgtgctgttcaagaaagtgttttaatatttactcttcattgatttaagtataacctgatcacatggctgaagtaatggagtcacatttggaggaaaatacatagcataaacgtatttttgatgggactttcagctggaggatgagcataacagttgacaagaaagaacaaaatcttgcagtcatcatccagtctggcttcccagtagtgagtgtaacagtaagaaatcaaacataactgactccatcttgtgtctgacctcacaggctaactgcctttgctcattcctgcatgtaagccaagccagctctgggaggaacttagtttacagtttaactttaaaaataaggatgataacacacccttcccaaaaataactcccgaggagataagagggtgcgtacacaagtaacaatgttattttaaacatttataagagcattgtgacctggccaaggacagagaagttttgtaagcccctggaatattaatctataaattaaggactgagggatgatgcttctttggacaggaccattcttaaacatacaccatgtatgttttatagctgatgtggcagaaagatttactctactgggccaattttggtttattcatgttagctacctggagcactgcattgacacagattcaagggctatgttcaggctcagtgggacagaatgtcacaattgctcagtgagtctgtcacaggcacagaaaggggcaatgcttgcacctattaaaggatgagtacaataagtagagaagtgtttgtagggattatatattataaaaaatcttgtatcagattttttctcattcaagccctctgcttaaaaagcaaaaggggtgaccaattaacatatttaatagacaaaggattattcctattagtatataaataactcatacaaatcagtaagaaagacaacctaaccaacctaacagaaaaatggtcaaagagttacagataatttacagtagaaaagagtgccaataaatatttgaaaaattgcatactccagtaaccaagaaaataaaaatttaagtgacaacgaatgagatgttttttaaacctatcagatcagcaaaaaattgaaaagtgagaaagtccaagattggatgggattgtgagaaaataggaacagtcatacactgtagatagatgtaccaatcagtagagtctttatcgagggtgttttggctgtacctattgaaattctaaatgaacgtgctttcacccaggaattccaattccagatttgtgttctacagaaatacttattcatgtgcacaaatatgtacaaggatactcattacagaattgtttgcaattgtgaaaaatagttaacctaaatgtccatcaagtggaagttgattaaataattatatatatgtatatatacatacatacatacacacacacatacactgtggaaattgacaacagtttagaataatgagagatacacatgcccagacatgggaagatctctgagatataaagtaaaaaattattttgcatattatatatatatatagcatataataaatataaatatatatgatcttatttattttaaaaatccaaacaatacattaatatgcacactctaaatgtgaaaatgcatttttaaaaagtctacatagatagaacctaaaatgttatgtggttacctctagggaggaggatgatgttgggggtgagagatggaagacaaagaggaacttttttttcactcgatgtatttttttattgtttaaaattttattcctgagaatgtgttcccaattattttataagaataagtcaagatgtgggagcatgtgtcattccagaaaagtacagttggggacacatgctggggccagatgatgcgagccctgagtctcagggtcaaggttgaacccaccctgcagacagtggggagctagtgaagggtctaagaagagaagaaaaggatcaagcctacatttctgttggccgcccctggcagtagctagagaatggtggatgcaacagggccactatgtgtttatcgaacagatagatgggtaaatgactgattgcatatgagaaagcctaagtgtaaaatcacaagtgtcacctctgggatgatttttctctctttccaaatcaattcagagaatgcattagcagctttaaagtcagcttgaaaaatgagggccttggattgagtacaagttgtgagccatcatcatctgcttagtatgattattctcaatagctgggtcttgactctttgaagtttgtcataaccaatttgttggtagtaatgaagtaacagtgtttgcaaatggtgtacttaggaaaagtgggagcagcctcgagattatgtttataaaagtattatcccccacgtgtggcattctgatatgttttcttcagtggaggggaagggatgggcaccaggcagggtgctggaggaaatcagacttaatgtgtctttcctgtgacatgtattcgactgggagaaaattttaagagcccctgttttgaggaaaggatagtggccccccttatatctgaagtactatagaattgagtatgttgtttaaaacagctttccattcattctattcccaggtgaatttctaatcgctgaccctgatgctctgatcgctaccaagttgttcactttgccattggtgtgctggtagaccagctctccaggaagaagaaaaaaagcctggtttgtagtgtttgccaatttccatggtgtaaatgctcccaccgtggctgatttcaaaccaccaatggtttaacaactagcatgcaaaattcttgaatgttttactgtcagctttctgtgagctggcatgagttgccacagtataccattgctccttgacctgaaacttcattgcagttgaaaacaaaacaaaacaaaatcctgtgttctggtctaacttagggaatggcttgcctttggtgaagaggtattattaacctacatctctcctatctctcctctactttgtcgggaactctttcttgagagcacaataacttaagggttaataaccccattttatggaggagaaagccgaaattcagaaagaaataacttgctcgagactctatttgtcagtatacctggttgtaaattccctccagaagaatgggtctcccccaaggtccaatgcgtcaactcctgggcggcagacccttaggatcaaataaggcagctcaggcatagtcctccgtagttacaaggaaaagagcatgacctaagtgtttctacagagatttaattctcacaacacttttatcgtttatgaaaacactaagtggaaagtgatttgttaattgtaaagtgtgagagaaatactagttaataactacttgttagtattgacaataatctcattaatgctcacaatggccctatgtcataggcaagattatcaacaggctggaagtgaagatgccaagggtctgaggggttaattcaattacttggggcctgatagcctgtgaggggtcaagccaaagggccagatctgcaacccatatcttccaaagcccagcatgttctatcacgttgcttctttgtacataatcttttctcctctactgggttatgaccccgtgagggccaagattctcctttgtctttgatgtctttgttgttcaccagccaaaatgagttttgatttccaggaggtagtttttggcctagtctaggtaacagggttagctaatgcagtcattcagctgattctcatacaaattccttagctctctaagggagaaatccagatagaccttttacatcaggtaaggcacttgggaatttgcaattaagtaagaagatgttgttgactgagttctcgctatctgtgcaactgaaaaagcagcccaagtttcctataaaaagtggagctgaagcatcagctttataaagagggctgcacatctgtctgtttctgcctggcacttctgagttcccagtctacccacaaagggttcacagcctccgttcccaaccactcagccggacctgcaaacactttgctttcttgactgaatccagttgttttgatttcctggcttctccctccaagacttattttctgccttgtggtcagtctttaataacctgctgggaaacagaaggaaggccagagtgtaatgaaggatgggtagggttgcgggaggtgagcctgaagcgagatatacggcaatatgcagtgtgtactgacttgcgttcagaaactttttctggtatgtcagtctttgcaacagtaggttacattccttgcggacaggagctaattcctgttcctcagagtaaatagcacagtgaaaaagtaaatatttattgagtgaaaaccagtgaggagagctagtgtggccttgggcagatcactttacttatctgtacatcacttggataatcttaaaggtaggaataaaaactctccaaagtagcaaggtataaaaaaagcgatcagcaaactgttcctataaagttttagagagcaaatattttaggcttttcaggccgtatggtctctgtgggatactcaaccctactattgtaccacaaaagcaggcacagaacagtgagcacagctgtgttccaatgaaactttatttacacaaacaggcagtgggctgatgctgctgtagcgggaagggtttgagaaatgagattagacccatgggggcttgactcctaccttggacactaacaatttgactttaggcaagttaattaatctttctgatcctgagattgttcggccataaaaaccatgatgactgcagggagggttgtgagaactggatgaacatatatggagtacatatcctggggcctggcacatgtagtcattgctgctttcattattattttcattattccagctctactattcaaggagtctctgagtctcagaatcctgctggtatttttagtttaggcttctctgagacgtaggctgacagctcctaggtgacatttcctttgagaaacaataaacaatttgagcagattccttatccaggcttgtgccctggggatagataaagacaagctttaggtatagcattctaggtgggctggtggaactttactttttaaaatgtcagcctggatcaggcacagtggctcacacctataatcctagcacttggggaggtcaaagcgggaggaccacttgaggccagaagtttaagaccagcctgggcaacatagcaagaccctgtttctaccagaaaaaaaaaaaaatgccagcctgggccccaccttctggcatgttttttccaggcagcctgtgcccttctgtcctgagcttcagggaggcccacttaggtctccttcatgtgttatcctggcctttgctcccattccttcccaaggccttcatcagaggatctcgaatctggcctcctgggtcacaggaaacacagaccttcaggtcaagtgcagggcattgactgtcagggttcaggtggcattgtgtaattcaagacaagtataagaaatggagccaggtcttcggagacctggggagtggtgaagaactgatgacagtatccccaagttgggaggctatcgcgtaggggttgagcaggcggccctgatgtcaaatttcccaggtgtgaatcctggctcaccacttgttaccttgggaccctgggcaagtgttggttacctaatgtgtaaaatgaagactataattgtacctatgacataagagtgcagaaagggttaactatggctctttcttccatctaagtagcagcttgctgtccagctgctgaggggctgctctgttccctctctccagagtgcatactcatcggcttgcacaggaccccaagtgctgacttcagctctggagtttacatgactgtggcgttatgtgaatgcatggtttgatttcttggtagcttttcttagcattcatttagttatttctttcattcattctttaagttatttatttacgtatctattcattccacattaattgggcatctactatgtgccaggcattatgcttcctgctcagattacaaataagacataatgcttgcctccagggagttgctcatctaacgggtaatagataagcaaacaattagagtacagtacaaaagtgtctgcaatacagatgcatacatagagaaagggcagatggcgaagtcagaggaggttctggcaggaagtggtacttagaatgcttttactatgcaggtgagaggggttggggaaggatgtttcaagtagaaaaagcatataccaaggcttgaagtactgtgatttgttcgaggccttgccagtaattcgtgtgatgagaacacagggtataggacagagagtctgaggtctcagagcagtggggaaaggtgggggtcagataataaaaggccttatggacactactaagtggattgaatttcatttttattccaagggcaatgggggaaccttgagagatataagcaggaagtgagaggtcagatgagccccgggggctgcaggggagccttctggagactttctcaacaaatcggctctgttaccaccgcagtcagaggcccacagtgtacagcaatgttgttttttcctttttgcattttattttggacaaaaccacaagaaaatgtcatttacactctgaagagtgttttgcccagggcagaattggatgtcaggcccaacctgctgaacggtgacaggttgctgtaggaaatgaggtacttagtttgaataggtaatggtcccaactattctatagaaaactccgaacttcagacttgaactccttcaggatgcgtttcccatctcccagtcccgggtaattgctccctgcactgtgtgccctttgtgttctgttcaagtttttggctgacctccacctgtttcagatgcagggactgataatccgtctcctttgtcagagtcctaacctctctggaagaaggcatggggcttacatactcttgtgtcctccatagcatgctgtagagttgcttgcccatggtagatgtttaattaagatgtgttattttaaatctgattttaaagtcccctcctttactgcatgggtgaggaatttaagagggagggaggaagggaacaaagaaggaagggaaggatagaaggaaagaatgaagaaaagaaggaaggaaagaaaaaaatttcttttttctgatattttttcttcttttactgaaggctcccctctggctggcaccgcacctatattgttcattgagtcctcaggaaagggatagtttcaccctattttcatagataagaaaaatgaggctcagagagactaaataacctgcccatatttgtgaaacaaattattgccccgtctgggcctagactcgtctctttctagcgcatcccacatcttcctgggactgagactgcagtgagggcccatgctgcactcgatctatcagccttgggatctagatcctccgaaactttgacacgtgatgtagctgctctcttgggaaggccaccaggtacccagacacacacagcataaatgccttagccaagggaacacagtggagactcgcatcatgggtaaatgaaacccgtggggcagagggaggaagcagctgctctctgaggcctgtagctacaggaagggccggtccctggagctgtggcctttcacagacaatccagacactgtcagcctgctgcctgggggagagagctgtgggaataaatacctccccctcactctctccccatcctctagtctcttgcttgtcacaggactattactggtcccaaatgggaatgagagccagggagcttgctagtgggtgccaaggtcagtctcctggggtgcagagcaggatacagacaagtggaaaatgggtctggaaggggaaaggagacgctatagcaccctggggaaatgaggaagctctgtcctgggacttgtggatggagagggcccaggactcaggtgtctaagtgtttgtgtttctgcagcaacattcactttcacaggtggccctccccttgtgaggtgagtcaagtctccctctcccagagttgcacaggtagaagggcagatcaaccagctactgagtgaaattgttacctcctgcctaggaggccctgccttctcccaggacagaccccattggaccaagagcagcaaatcttctccagagcaaggtgggccctggctgggctgaggtaccaggagatggagtgactgtgtttcttaaggcagcagcggagagggtagcactcctccctgtactgcctgtacaggcctgtattgaaaaaaaacagtgtctgtattgcagacacttttgtactgtactctaattgtttgcttatctattacctgctagatgagcaactccctggaggcaagcattatgtcttatttgtaatctgaggaggaagcataatgcctggcacataggagatgcccaattaatgtggaatgaatagataagtaaatgaataaattaaagaatgaatgaaacaagtaaatgaatggtaagaggagctgctgagaaatcaaatcatgcattcattcaatgccacagtcatgtaaaatccagggctgaggccagaccgtgttgggggcaatgccgcattctcataaaatgattttgtctccattctagtcacacaggaagactacatttccagtttcttttggatttagagtgggccatgtgataggatcctggccaataagatgtggccataaatgacagatgacacttcccagtctggccattagacctcatgagtcattgtccacaaactcgctggtttttccttttgtgtcactagaagcaaaggactctcttcttcaaaattgatggtggtgtctgtgatggttaattttagggtccacttgactgaattaagatatacatagagaactggtaaagcattacttttgggtgtgtctgcatgggtgttttcagagaagaatgttgtgtgaattgatggactgagtggggaagattagccctcaaggtggataggcccacagccaattggatggtgcttgctaacactgagggctaatcttccctactcagtccatctctctctgtctctcttaccctatctccctttctctccctctttctctccccctctcctcctctctccttccccttctcccgtccccctcctcttctcccccctctccctcatcccccctctccctctccccactctccccctctactcctctacagaccccctccctctccccacctctccctctctccctctctccctccctctaccccctctccctcccccctcccttgccccctctccctccccctctccctccccctccctcacccccctctgcccctctctctcccctctctgcccccctccccctctctcccccctctgtccccctctctctccccctctctctccttctctctcccccaccctttccctctccccctctctctttccctctccccctctctttccttctccctctctctctttccctccccaccaccctccttatcctattggttctgtccctctggagaatcctgacttacacagtggctgtgtttaatacagcagtatcctaagtgggaaaaagaacttggatccctgagtcaccccctgcttggaggacagctaccgaagagagttgacattgatattggactgtaatgtaagagaaatagaaatctttattatgttaaacttttggggttgttatagcagttagctttaattaacttcattcattaatatactcttctcttcctagtctttagctggacactgcctaattgaggctacctcaaacgtgtgcttgatgtgctaagcctttaaatggaaatattcaggggaaacgtttctaggatgtgggagaaaataccacctctattttggcattttactcttagataaaaatgacacttatctgatcatcactctgtggctaatgctatgctaggcacttaaacaatatgccaggcatgttcacacatgttaactcagtgaatcctctcaaacaatcgtgagagattatttattattcattatctctgctttgcataagaagaaactgtggctcaaaaaaaattaaataactttcaatcattgcacagctggggagccatcaagttactaataatccagaaggaagaagggaccttcagatgaaacaatacaagaaagactttcaaaaaggcacgtgaagaacaagacatctgtaatgcagaaggtaccagagtaaatgagctgtcagaattcagaaagcttcaccaagtattgtgtaaaacacgtacgtgtgttctcagtgaaaaaagaaaaagagaatagaaagcaacgccctacccatttatgtgagaaaactgagggtcatagagggaaagtgcctcatccatgccgcctggctagtaagacaaaaccctgggactggaacccatgtttaaaccccactctttttttcttctattggtaatcagacttctcctagaaagtggccattctctaatcacagcttccagaactgttcctactcaatttaaaagtaacccaccgtgtagccacatttcaacaccaggggaaccaagcttgggtgatgggccagtacctctggtgggtgggagcagctggcacataaaaagattccagctttggcaaatttcttcacccaaatcaaagtcttacctttactttgcttctgctaatatatatgtacttttcgttatgaatctaaaaactatcaatatcaaccttgactttaactctattattttcaaaagtcgtcaattttatagaatgtgctcaaggagagcccaactacctctgtctttgatctcaaatgtgggccgaagtgtgggggtttcttgaggttgtagagtagttacttcctgaggtttctggcacctagggtcaccaaatttctcatctctttttattaaattatgctctcctactaagctttccttggtgtcatcaattcttcccaactctggcttttctgggaagcccgggttgtatgccacttgagtgagggttaagcagtctgaattcctggaattgggccacttgtaccacttcctcttgtcagtgtccagtctcctcttgaaaatatttattatccatttttcattctctgcttcccttgggtgtttgacagatccgtagttatttccagatttgaagactgcaggaaggagtctgggttctctctgatgctgggtttctctctataattggtttgcgtttttatcatgcaaacttcccttctgaataattctgtaacaagggtctagaagatggcctcaatggtttgacagttgttttaattcactggaaatgaaacaattgctctaagccacactgactacttgtctacctctgaatcggggaaaaaaatcggaagccgcatggccaagctgcatgctattagttaaactctggcaggcaggtaactccattgcatgctgctggtggaagggtgagctcacttctctttgcccaaaggatggtaaatagctgaggtgaaagtgttgctggatgtctaagtagtgatctccctagtcccagagtaacccaggtatgaggaaggattctgaagtttcagggacagaggaatagtatagtaaggtgtagtgttgaacaatctgagacacaagggcttgaatcctggttctgccactttactaagattaggctattgagcaagtcccttcaacgctctgaacctttgttaggctcactgtgcttagggacaacaagtttttttttaaattacagaatactattaaaggatcagataaaataatgctggtaaagtgcttagcataatgtctggcacatggaaggtattcagtgactagcaggcattgctcttcgctgtattttcccaccaaccaagtgatgcaacaaagttcagtttaagcaaggctgtgtggggggcatgggccagaggctgtttgcagattctatgcctccctgtaatttcctcccctgtcgagcaggtgctttcctccctagcattgcctatcctgggctttggttacttattattttttaaaaaactgaggcaaggccaggcatggtggctcatgcctgtaatcccagcgctttgggaggctgaggtgggtggatcacctgaggtcaggagtttgagaccagcctggccaatgtggtaaaaccctgactctactaaaaatacaaaaattagccaggcatggtggcgcacacctgtagtcccagctactcaggaggctgaggtaggagactcgcttgaacctgggagacagaggttgcagtgagccaagatcgtgccactgtactctagcctgggcaacagagcaagattcatctaaaaaataataataaaattaaaattgaggtgacattcacatagcgtaaggttaaccatttagaagtgaacaattcagtggtatttagtaccttaacaatgttgtactactgctatctctatctacttccaaaacattttcattaccccaatagaaaaccacataccaattgagcagttgctccctcttcccctctctttccaaccccctgtgaccaccaatctatctctacggatctacctgttatggatatttcacagaaatgaaagcatgcagcatgtggtctttcaggtctagctgctttcacgtagcataatgtgctcaggttcatccgtattgtggtgtgtatcagtacttcattcttttttatggatgaataatagtcattgtagcatattttgcttattcattcatccatccatgggtgtttgggctgtttccacctcttggctattgtgagttgtgctgctgtaaacatgcttgatgtgtacttgtttgcatacctgttttcagttccttggggtgtattctggctacttattttaattaatctctgctgtgttttttgccaccacattttctgagaggcaccatgacagcatgatgaggcatgaggactctgatacctggctctcttctttgctacttactggttgaaccatattggtcaaggggcttggcctctccatacctctgtgttcccctctgtaaaatggcgttcataatgacagcccctataggaggattgtaatgatcagatgaattgatacctgtaaagcacatagtctgtgtgtaatgaacgttagcaatcactgctatcctctcttttcagtacttattttctgcagtctccttttggacccccgtttgtattaggatctttcatctttcaaatatccagagcagctctttcatcagctggtgactgaaatttcttcctgggcaaggcggttgagccactgtgttgtccctttaacatggggagtcctgggaacctggggagtcagctcctcgggaacagaaagaagacacccaccaagtttagaggagtgggactttgagcttattccaacctgaccagtagggatctaaagctgccttcttcctcccctccacaggttctctggatctatgtctcagatattttcccagatcccatatggctatgccatattctttctcatggcttgcaatggcttcctattgtttgttatattaacaaaacctctctgaaaccccatgaagtaggtagctctctccccatttcatttttgtgtattttcttgcaaagggggcaagggagattcttctactttctatggatgaggaatattcaactgagaggtataacataattgtcaaacttcgtcagtgtgtgaattgcagagcccggactagaagacacgggcagacccaggagcacctgctacttctggtttgcacgctgccttccttctctgaccccctgtatcaagcccagctgagttttccttagtctactttcaactgatctgtactaagccagtgaattctcttcatgcccagaacacctgccaggctcattctagcttcagatcttagccccagctgttctgtttgtctggattaccatcctgcctcccaccaattccaatcctgccacctggcaggcataattcaaatccctctttcttcactaaagcttcctactgagcttttcaatcaagaccttgttcttcatttctgaatttcctatcatttttcaagttggtgctctttggccttcagctagcacaagcagtgtctttgtgtgaattagaagaaggcattcattgaccctaggctgatgaattgtaaaaggatgtccttagtcgtcttctcagctgggcacttttgggcagtgtgctgactggacaaccatacttagccaacttggctatctgacagtttcaaaataattgctttctgagtgttaaatgttactaagtcacatagattgcaagagttccacactcatttgttgtgtcctcccaattagattttaagcttcttgagggcaatgaccattacttgtccttcagttttccccactgtgcctggtccaaagccaagtgctaagtctctagtgtccagcaaatgaagtgacttagaggaagtgtgtcagccttggctctgaagggactcagcaaaactcttgcaggaaagagctgactgacacccacagatgatcttagccacactgactgcttcactattttgggggcacacccaccaacggctgttccttcattttgagctttatcagctgaaatggcattcattagggaaggcttctttctcagaagcctctgttagaatcaatttcttcctcctataatttccaaggtggcctttctcttctaacccacaattctcagctcccaaaagtatttcttaagatgcagctcaaatttttacctttaaaatctctatcagggaggtatatcccaaaatccactggggccacatctccccttctacactaagttcttttgtggacaaggcttgtgcctggcacatagtaggccttcactcaatggctgttgaatctctgtccaccaggttccctggctgtgtacattttccagcaatgcatcttcattcactgcagcaaaagtatttgcatcccttctattagcactatttgacatttgtttaacactttccccaagctttttctcatctcttttctggttttgttttcacaacctgttaggttatgagaaaagaaattatatccatttctctcatgaggcaccttaactccaggaagcagaagcatcttatctcattgtctggtgacaggggtgaggctgccactcactcaggtgaccactccggcacagtgacagtttggctcttgtttcctcctcttaactcttgtctgaagttaaccattcaatatccttaaaattcccagagtctgaccccggaagtaaagaggccaacttgggtgggaggggtgagtatcctcatcaactctagaaatcctactacaggttgagtatcccagatccaaaaatctgaaatccaagatgctctaaaatccaaaacttttttgagtgttgacatggtgctcaaaggaaaggctcattggagcattttgaattttggattttcagatttgggatgctcaaaagtagtatttattctgcaactatttcaaaacctgaaaaaatcagaaacacttcggcatttcagataagggataatcaacctgtagtacatctcactgaattcatgtgtcagaacctagcatcctgggcccgtaaaggaattgttcttttctttcatccactctccatcctaccattctatctgagcatctgttccagggccaggtaacctatatgtatttggaactgttaggcaaatatctttttttcccttggaaactattttctagaggaaagcaaatgtctcgatatatttgcagatagaagaatagaatcacctgtgacttaaaaaaaaaacattaaaaaatctattgatggcatggactcaaaagtcagagactgatttaattggtctggggttgggagccattggcagagttcctatgccttgggtcctgtcttagtccattttggctgtttaaacaaaatacggtaaactggctgcattatagaaacagaaatttatttctcacagttctgaaggctgggaagtccaagattaaggcagatttagtgtctggtgagggcccactttctgtcttatagatggtgccttcctgctgtgtcctcacatggtaaaaggggtgaggcatctctctcaagcctcttttataaagacactaatcccgttcatgagagctccacccttatgacctaatcacctcccaaaagtcctacctcctaatacatttgccttgggggttaaaatttcaacatacgaattttagggagacagacattcagattaggccaggcatggtggctcacacctgtaatttcagcactttgggatgctgaggcaggaggatcacttgagcccaggagttcaagaccagcctgtgcaatataatgagaccttgtttctactaaaaataataaaaattagccaggtgtggtgacgaacacctgcagtccagctacttgggagggtggggtgggaggatggcttgagcccaggagatagaggctgcagtgagctatgattttgctactatactccagcctgggagacagagtgagaacctgtctcagaaacaaaagcaaaaaaaattcagaccgtaacagatccagtataaagaataagactagatgactgcagtcccaaagagaagcactgttccattccggcatcagctaagacatgttcacccaaggcttctctagcatcagcttttgctgtaactttctgtttccagtacacaccagctatatgatcctgagtgtgtatggatgtctttgataacttccttatctataaaataaggtcaagaactacttggcagaactgctaggagcaccaaataaaataaagaatgtatgtaaaataatatgtaaaataagccagcactctgcctgatacatatttgatacataggtcaacaactctgaattgaaaagaatcaaatactatcctccatcccataggaaaattctatgtagcaatttttttttgaatatctcctattctgcaaagtattatatgatttctttctattcctctttctgtgcatagaagggagagatacaaagatgaaagaagagatcatctctgtcttcagggaacttctaattggcatgtgcagacaggaaaatatagaaccacatgaagttctttgtatattacatacacatatttcaaacatagaaccgagtgaagtaaatgttaattagagatataatcaatatgctgtgtgagctcagaggatggaagaaatcatttcccctgaggagatgaaaacagcattttaagctgagtgatgacatggactatggttaggaggctggaaagtgtgagcgggtgtctgaatgtcagcaaagggtctagggtagctggccccccaacgttcatcaggagggctgagacatgaatttttggacctctgctgagaatccattaagaaaggctttgcaaaagaatttgatcctttaaccttgaaacaactgggaaccattgaaagcttgagtgttgggagatatgctctggttggaagttttcgttcattcatcctagtgatgagatgggagtgggctggcaaagtccaggtcagaatatgactctctaacccttcctccctacctgggccatggctaagacctcagataccctgtgaagagcagctcaggcaattctcctgagtcctgattcctatgtccattccaggtctggcatccaggtgctgccctcttgtattgtgcctgaaatctgtttctctaccaaatcaatttggaatgctgccctgctggattttctgtgtagcttttggtctcctctctggaaagtgtctcagattgttttctacctactcctcagcccagcctaaatttccttcaacatttattcaggatgaactcagcttccctttatatgagaacagtgtttgggtatttttacactcttgacccacggtctctcacttttctggagactggaggcagaaggaccttctgggtagatattgttgtagtccaggccaaagaggatgacggctgggactaggccttgtcacagggctgaagggttgggggagggaatgtggcatggaagagacactttggagttagaactgttggggccacagctggcttataacttttcgtgatggacccagcttgtttctgaacttctggtatcctgactcacagtttgttttcattgtttgtaatagtttgaggtcttggaaactttgcaatctgagttattagaagtgatgacttggagtggattttagaaggctggtgccgagccagtatttcaaatagcaatgttttgagagagagatttgttattcaaactctggacctgttaattgaaggagaaaattgggatgggaaacattctgagaccatcgaaagtagttaacatgcataggaatctggacctgattctgaaaagggaatggccattagataactctggtctctgggctccgatggatgcccgtcagaggcgaaccctccactgagaaggtcctttaggtagaggtgtgatccccaaagtttgctgcatgttggaatcatctgcagatctttataatacactgaagcctggctgctgctcccagacatcctgatttaagtgatatgcagtacaacttgggcactgggatttttcaaactttctaggaaattcttttttaaattattactatattttttattgagttatatttttatgattgacatacaaaatgaatgaatgacatctatataattatgtttttatgattgacatataaaactgttgtatatatttaatgtatatacatcttgatgagtttgaagataagtatacacccttgaagccatcaccataaacaatgcataaatgtaaccattatccttaaaagtttcctcgtcttttgtcataagaacacttagcataagatctaccctattatttttatatatacatttttaaaatataaaagatagcattgttaactacaggtattatgctctacagtagatctttaggacttactcatcctgaataactaaaacgatttgactttttaccaacacctccctgatttctcctcccccaacctcctgataaccaccaccgtactctctgcttctatgagtttgactatttcagattcctaatataaatggggtcatgtagtatttgttcctctgagtctggcttatttcatttagtactgccacaactcaatagaaaaaaacccaaataatctgattaaaaaatgggtaaaagacctgaatagtcatttctccaaagaaggacatacaagtggccaataggtatatgaaaaggtgttcaacatcactaatcatcagggaaatgcaaatcaaaattacaatgagataccacctcacacctgttatggctattatcaagcaaaccaaagataacaattgttggcaaagatgtggggaaaagggaacctttgtacactgttgatgggaatgtcaattggtacagactatggaaaacagtatggagattccacaaaaaattaaatagacctactgtatgatccgacaatcccacttctgcgtatacacccaaaagaattgaaaccaggattgcaaagagatatctgtactcccaagttcattgcaacattacttacaataacaaagacatggaagatgttctttgaaaccaacgagaacaaagacacaacataccagaatgtctgggacacattcaaagcagtgtgtagagggaaatttatagcactaaatgaccacaagagaaagcaggaaagatccaaatctgacaccctaacatcacaattaaaaggactataaaagcaagagcaaacacattcaaaagctagcagaaggcaagaaataactaaaatcagagcagaactgaaggaaatagagacacaaaaaacccttcaaaaaattaatgaatccaggagctggttttttgaaaggatcaacaaaattgatagaccactagcaagactaataaagaagaaaagagagaagaatcaaatagatgcaataaaaaatgataaaggggatatcaccaccgatcctacagaaatgcaaactaccatcagagaatactacgaacacctctatgcaaataaactagaaaatctagaagaaatggataacttccttgacacatacaccctcccaagactaaacaaggaagaagttgaatctctgaatagaccaataacaggagctgaaattgtggcaataatcaatagcttaccaaccaaaaagagtccaggaccagatggattcacagccgaattctaccagaggtacaaggaggaactgataccattccttctgaaactattccaatcaatagaaaaagagggaatcctccctaactcatgaggccagcatcatcctgataccaaagccgggcagagacacaaccaaaaaagagaattttagaccaatatccttgatgaacattgatgcaaaaatcctcaataaaatactggcaaactgaatccagcagcacatcaaaaagcttatccaccatgatcaagtgggcttcatccctgggatgcaaggctggttcaatatatgcaaatcaataaatgtaatccagcatataaacagaaccaaagacaaaaaccacatgattatctcaatagatacagaaaaggcctttgacaaaattcaacaacccttcatgctaaaaactctcaataaattaggtattgatgggacgtatctcaaaataataagagctatctatgacaaacccacagccaatatcatactgaatgggcaaaaactggaggcattccctttgaaaactggcacaagacagggatgccctctctcaccactcctattcaacatagtgttggaagttctggccagggcaattaggcaggagaaggaaataaagggtattcaattaggaaaagaggaagtcaaattgtccctgtttgcagatgacatgattgtatatctagaaaaccccattgtctcagcccaaaatctccttaagctgataagcaacttcagcaaagtctcaggatacaaaatcaatgtacaaacatcacaagcattcttatacaccaacaacagacaaacagagagccaaatcatgagtgaactcccattcacaattgcttcaaagagaataaaatacctaggaatccaacttacaagggatgtgaaggacctcttcaaggagaactataaaccactgctcaatgaaataaaagaggatacaaagaaattgaagaacattccatgctcatgggtaggaagaatcaatatcgtgaaaatggccatactgcccaaggtaatttatagattcaatgtcatccccatcaagctaccaatgactttcttcacagaattggaaaaaactactttaaagttcatatggcaccaaaaaagagcccacatcgccaagtcaatcctaagccaaaagaacaaagctggaagcatcatgctacctgacttcaaactatgctacaaggctacagtaaccaaaacagcatggtactggtatcaaaacagtagatcaatggaacagaacagagccctcagaaataatgccgcatatctacaactatctgatctttgacaaacctgagaaaaacaagcaatggggaaaggattccctgtttaataaatggtgctgggaaaactggctagccatatggagaaagctgaaactggatcccttccttacaccttatacaaaaattaattcaagatggattaaagacttaaacgttagacctaaaaccataaaaaccctagaagaaaacctaggcattaccattcaggacataggcatggacaaggacttcatgtctaaaacaccaaaagcaatggcaacaaaagccaaaattgacaaatgggatctaatgaaactaaagagcttctgcacagcaaaagaaactaccatcggagtgaacaggcaacccacaaaatgggagaaaattttcgcaacctactcatctgacaaagggctaatatccagaatctacaatgaactcaaacaaatttacaagaaaacaaacaaccctatgaaaaagtgggcgaaggacatgaacacacacctctcaaaagaagacatttatgcagccagaaaacacatgaaaaaatgctcaccatcactggccatcagagaaatgcaaatcaaaaccacaatgagataccatctcacaccagttagaatggcaatcatcaaaaagacaggaaacaacaggtgctggagaggatgtggagaaataggaacacttttacactgttggtgggactgtaaactagttcaagcattgtggaagtcagtgtggcgattcctcagggatctagaactagaaataccatttgacccagccatcccattactgggtatatacccaaaggactataaatcatgctgctataaagacacatgcacacgtatgtttattgcagcgctattcacaatagcaaagacttggaaccaacccaaatgtccaacaatgatagactggattaagaaaatgtggcacatatacaccatggaataatatgcagccataaaaaatgatgagttcatgtcctttgtagggacatggatgaaattggaaatcatcattctcagtaaactatcgcaagaacaaaaaaccaaacacctcatgttctcactcataggtgggaattgaacaatgagaacacatggacacaggaaggggagcatcacactctggggactgttgtggggtggggggaggtgggagggatagcattaggagatatacctaatgctaaatgacgagttaatgggtgcagcacaccagcatggcacatgtatacatatgtaactaacttgtacattgtgcacatgtaccctaaaacttaaagtataataataataataaaaagacatggataaaagctaaattgttcactgacagatgaacaggtaaagaaaatgtggcatagacgtacaatggaatattagccttaaaaagaaggaaatcttgacatttgccacaacgtgggtgaacttggaggacattatgctaaagaggttctaatatgtagtaaagtttgggaacctctagagtaggaagtagtagggatgaatatttgatttacggtgattctcacgttgagtgtgcatcagaatcatctagggggcttgttaaaacagatggctggggctcaccctctgagtgtcaatcggtctgcagtgggatctaaaaatgtgcatatctaaccagctcctaagtgatgctgttggctggggccatgctttgagaaccactggcttagaagagttgagtctggcatttccacctatgagctatgtgatcctgaggctatcacctggtctataagaagtcaatttctgcatttacaacccagggacagcagtggtgattactttgtgggtcactgtgtgggtaaaatgagatgatatttgtaaactgcttggcacagcgcctggaccacagaaaatatgcaacctatggcagaccttatcaataatagtatgtttttttcatctggagtcttggcagatctttccttatgttcagttgtgccagttggtgaataatattacagtaagtttctgctcctaggggtcctacttttaggatttctggaacaggaaaattgagatactcttatgaactgcaggtgttctggattccagcaggacgggtccaccctgggggtatgggcatatgctaattgacccttgtcaatcatcttctttggcctgatgtgtgtgttatgggctgtggtcaaggactgctttcctgtccagattccatgtgattctctcactgtcttgtaccacattccagacacatttagtgcagtgagttgtggttgtcctgatgtcaccatggaaacttaactgctacagagggagattggaacaaggctctaaatggtctgggaaaccataaaatgtgtccccaagaaggggctagggctgtggatttccacatgatttttttttttttgagacagagtcttagtctgtcactcaggctggagtgcagtggagtgatggatcttggctcacggcaacctccaccttctgggttcaagtgattctcctgccacagcctcccgagtaattgggattacaggcatgtgccaccatgcccggctaatttttgtatttttagtggagacacggtttcaccatactgaccaggctgttctcaaacttctgacctcaggtgatccactcacctcaatgtgttctttttttcattcaatttgtccagatctctcttgggtgtatatttacctccctcccccatttcgcagaggagggaactgaggcttagcatgtgtttccttgcaggttgtagactacttctccaaaagggaaggggtgcccctgtcagcctgggctccaacaggcaaagctggccgatcggcacacactgtggagcacagagacaccactcccctggaacttcctgagcacccatggactgcaaaattgattaatgtatttttgttccttgatgtcttcaacaggtatgaggtggtatctcattgtagttttgatttgcatttccctgatgattagtgatgttgaagagatcaagacccagatgagaccaaagtcctagatgaagacaccaaagaacaagaatacatcaatagattttacagcccatgggtgctcaggaagtccaggggctctttggtactttaaaaactaccaccttttttttttttttgagaggtactaatctagctagtctttttattactcctacatattgtgagggcaaagtgactatgttttctttttctagtttgggaaacctagtgagtatggagaaaggggcatttaggactggcccagaaagtcagagacaggagccagtttgccccattttgagtcctgtttggtcaaggtgaaagtctgcctatgcctaggggccctaggggtgagagactgggtttttctttgttctcactggactaaagaactgaatgagaggcacagttggggaattaagagtggaaaggccaggggaggtcatcttgtccaaatcatttgtcgataaggactcagccccagggaggggagttgacttgcccagtgtcagagaggatgctgtgatggggtggggcctagaaacccagttgcctgcctgccttccttgctcatgcttctccttctcttcctcaacacatcgtaggcatttatctatgtgcagtctgctgggtatctattgctttcgtttgctgtcactctggtgtccttgttgtgattgatgctaccaccaccctgtaaaggaaggcatggtatgactcagataaacttttaataggcaggtcgtacaaatgctctactattggtaccatttatagaaaggtcattgcaggtattgtgcaggctgctttaagtaactacatagtgtttaagcctcataactcatggaggcaattattaacctccccaatgtacagatagagaagtaaagcaacttgcctagggtcacgcagcaggcaagaggcagagtaaagttgatttaccatccatattcttcagctgttatactatatcgctgcctgccattgcaggttaaggaagattctacctcagaagcagcagcaagccatgtaaagattgccacctgcttaccctaaacctttgtgaatatttggttctctggaaaaataaggttgctcagaaataggtctagatgccatcatagctaaggctgccgtgtgtctgacattgatgcaaaaagtaaagtaaaagataaaatccagttaagtatattattttgaatatgaaataactgggtgttttgaatttttcattgtcaatccatctagtcactaggctgaagtttttcatatgcttgggaatgttctcatttgcacagactctccttgcctgtgctctcccccttccaggagagtgtgacagaaaggagagatgaaagttatttttaatttggccactgaacaaacatccaagtgttctcttccaggagctaagcctatatgttttctcaacagggtattaattacctggctctgggaatggctagacaggctgttctggatgccctgccagccccgtatgcaattgctcctgcacccagcaggactcagagacttcagcagggagcatcctctttctcaataaagtcagacatgggtactgggtaacttgttaaacacatttattgatttcttgacagtaaccaaacacagtgagtgaccattataaacaagaaaagaaaggcattcgttttgtactttgtgagatctggctgcacctggagagaaaacatacccctttcccaggaacttacaaggcaaagtgcattccttcacgggagcatcacaggggggcatggcagttttgaaacgcaagaagtctgtcgcctgctatctcaggctgaagctcacctcatgtgaatgattgagccatggagtggaattaaagtcatacttgcttagcaaatgcattcctgattgccacaaactcagtaaaaactggctgcaaatgaacaaaacatgtagatgaaggaacaagtgaaatcaaagaatgcagttgcatggagccagggcttagcctgtaaggaaggagaacagaccaaagccagaaaaatgaaattaactcgttaaacacatttattgagctggtaacaataaccaaacacaatgtatgacctttggaaaacaagaaacagcaaatggatcatttctgatcttggcaaatcctactacagatatgtgacaaagagggaaataattccatttccttatagtctgtggtgatatatatacaatgtgtagctcttcaatgtctgtcctttttttctttgtaaattgttgagtaaacagaagaatcataatctagaaataagtgtccttggtcaactttgtcctgctcacctgctaccagcaccctcaaaggatcctaggacactatctgaaattacttgatgcaaagtccgtttgatgccatcagagctgtattttctcctctctcttttggaagaattttgtatgtacaaaggctgaaaagtctcattgggtagatttattagttcaggaaaacggtatcaaaattgaaatcaggttaactggttattttcttctaagacctcttatgaatgagacttttgtttctgaaacttgacttcccatgatggaggttgtaagagtgtgtgtgtgtgtaggtatgtttgcatgtgtttgtatgtatgtgcaagtgcttgtgtgtgtgtttgtgagtatgtgtgagagatgtattcctctgccatggttttgcagacacttttcatgaagaaagggccaatcccaagaatgaatgaggcttgggggaaagaaggagagagaagcaagaagggggacattctaggttacgtcaattcacagttgtagcatttcactgaggtgggattcttcttggctttgttccctacttgaggagccattcatttactgcaaagagagagaaagaaaaaaaaaatcacacatacaacataaaacgaggcatactcaattaatttgcacacagttttagagaattcctccagaggggaagggactgttttgtaaatgcctgcttacttatatgcattccaactactcccttccaattctccatgaccttctaggcctatactgaccaatatggtggccactagctgccatatgtggctactatgaatttaaattaattaaaataaaaaattagttgcatcattgtactagtcacccatccaatgttcaatagccacatatggctagtagctgctgtattgggcagtgcaggatagtcatcaacctatcatgaaaacattcccattaccacagaaagttctagtggatgacactgctctaggctagggatggaaaaacaacagtccacagatctaatccagcacaatacctgtttttataaataaagttttattggaacacagccatacccattcatttagatattatcaatggctgatttcatactacaatgtcagagtgccatagagattttatggcttcaaaacttaacatatttactctctgtcctttatagaaaaagtgtgtagactcctgttgtagaccatatgctctgtttggataggtgtcttatctgtcacccatcacccagctaactgacacatggtaggaacacaatacaggggttttgactaaagagaagaagcaatgaatgagttaggtatttacttttctggtagttccggctggaagggtgtggaaaatatgtagtttgggcatgcaagtgtatctgagagagaaaaaagaagggaacaagggggaagtaggaggaatgaagtggaggatcaaggagtagtggtggaggctgcttctaaaagctgtctggtaataaccacagccctcctatttggggagcatgttattgctacaaagggcttccctatccaggctcttgtttgcttcctttaacaaactgtgaagtagatggcataggaactgtcacgaagaagccaggtctagggggtaaacaatgtggctgggtttgcacagcttgttagaactaggcccagaacttgggtgtcctgatttccagtccagggctctccaagaccccatccttcctccatctttctttccacactgagtgtttaccacaatgattaacagatgtttagtagtaagcagaagggaagagagagagggctgggtgtgcaccacagagttacaggaggcagatgtcaacttaaatgtcccctttagtgggaataataaccatttctagggacatagcactgggcaaagatacactcacaaattaccccattggattctaatggcctgccctttagagtatttgttcatcttctaggggaaagcaggtctttcttccatatacttaaaagctctaatgcttttcactgtcctgttctaacagataaccttgggaacatcagcctttctgggctcttttgaaaaatggcaataaaaagctgtcttgcctgatctacaggggttttaaaggtttgatatatgtgtttaaaggttacatatatatatatctcacatatatcaaacctctacaccttgccatctacctaccgtccatccatccatccatccacttacttacctacctaccaacctacctagatgcattcatacaggtatctgtatcacatatatcaaaactttagaccttcatcaccatgcaaatggagtgtgatggctattgtcatttacagtcatcattcctataatggaagataatgccaggcctttaagaacaggtctaagcagaaagactgagctctagcctagatcctccactctctgagccaccaaacccacctctatactgaagcttctgggctcggttgtttggacagtccttcccctgtaaactgaagttgatattggtgcggatgcagcggttgttgagtggctggacaggcctgaagttgtcactcatgctcagaaagatctgagatggctggttctggctgagcaggcgcaaggaatgcatctgaggagagagaagtggccgtgagatccaaccatcctcttaaatgcactagggaagaaataagaccacagagactctggccaagctaggtggtattggctgtatgaggaaagggctgtataagccccacagagtcccttttttccatgggttcagttgagctgaaggcccattatacctccacacatgaagccagcctttcttctagcttactagcttgtgtatgcctctgaacaagtcacttgcgctctctcaccctcaaatgcagcatccaaaaaaggagcaaatctggttaggtttctctaaggttctttctttctttgatactctttggttcaataattccatgactcccacatggtattacgtggatcatagtgattggtccatgggtcagagctaaactaagctggaccagtttggtttcttttctgtgagactatgagggccaggtggctggactgtttgcagccatgttctgccacaggactgtgaggcaaaagaagacggtctctagcaggagagaagaatgaagtgaatgtgtggtgagaagaggacaacagagagaaagcacttctggggttcccatttcagtgaatttctgatgtcaatttctgattttaaattctctaagatgccctcgtagctctcaaataaatgctttttctaagcttaagtggggagttactgttgcctgtcacccagtgggtcccattcaatacagataggttaaggaacttcaaattgttcaaatggtggtcaggtgggaacacatatcccgtcaaggatattggcttctgcttcctttgctcatctctcctttaatttgttatagactcccacagtcgtagaatgtcagagctggagcaaactcatgtaatttatccccctctcaataaagaagaggagtgttcatttcatagaggtgggtgacaggcctgaagagcacaataagccgtgtagccaagctcacacaggaggacccatctgcctcccatccagttctgatgagtactaactctgtgagatgatccaaaaaaaacactgcacattcaaatatgtgtgcaaaatactacatatcataccacttcctcttgaagactgacacatatattagcatttaagaaggaccccagaaatccttcaacaatggaatctatttaactttttaaaacccaactttttcaaatgcataatgacatcttccattttgcttgcttgctttctgaacactgtagttgtagaatacactctgggaattaatggctatcttttcccactgagacagttgagatgcttctataattagctcaggctaagccttttggatgctggctctttaaacccaggcatatgggttgaatcgtgtacccctgaaattcataagctgaaggtactggtaacccctagttgctcagaatgtgaccttatttggaaatagtcattgcagatggaatgagctaagacaagcttattggggttaggctttaatggaatacagaaggtgcctttataaaaaggggaaatttggacacagagcctcagacacagggagaacaccttataaagatggaggtagaggctgggtgtggtggctcacgcctgtaatcccagcactttgggaggtcgaggcaaatggattacctgaggtcaggagttcaagaccagcctggccaacatgatgaaaccccatctctactaaaagtataaaaattagccgggcgtggtggcacgtgtctgtaatcccagctactcaggaggctgaggcacaagaatcgcttgaacccaggaggtggaagttgcagtgagccaagatcacgccactgcactccagcctgggtgacaagagcgagactccatctcaaaaaagaaaaaaaaaaagatggaggtagagcttggggtggtgcttttaaatgccaaagcacgtcaaagattgtcagcaaaccactagaagctaggggagaggcatggaacagattcttcctcacattccgctgaaggaagcaacgctgctgacaccttgatcttggacttctagtctccagaactgtgaggcgataagtttgtgttagtttaaactacccagtttgtgggactttgttatagtggtcctagtaaactattataataggcactccacatttcagtgatttttttttaacatcattcttctccattagctaaatgaccagagagaaactcacctgcatcctggttatatagacaggtttgttcattatgatccaacttgctgtctcatagcagggtgggatagtcatcgacccatcgtaagtgatgaaactagaggtctctggatatagttcctctatattaagcccctgtagtaaatatgcatcatctagagaaggaaagaagacttaaaaattaggtttcttgagaaagggatggtattgctgacatacatacatacatacatacatatacatatacatatacatacatatatacacacacagatatatatgtatttcttttggaattccagaagactctatctgtcagaacaggctgcagtaacaagcagttgtcccccagatctcggttgttttaagcaataagaatgtatttcttgctcacacacatgatcattccaggttggctgaggcttccctccatgtcattgtccatgctttgggacctagactcttagagcagtaaacacctggacctgtgcggatcacagtgacagaagcgaaagcatggcgaatgtgtgttggttcttaaaacttccatcccagaagtggcacacatcacttgtgctcatgttttggtagccaaagaagtcacatggttaaggctgatgttggggatgcgaggaagcacattccttccacaggatggggccctgagcattggtgagctgtaagcaatgcgttctaccacagggattgtttgaggagtccttgattctagtccctgagatctggactcctaggcattacaggtatcatgagatggacaattaaagcttctagacctgttgaaattcacctggtgaccattctcacttaaaacaacaataagaaaatatttttggatagaaaagtaaatcaggccaaatcctaccatgagattctatggttaagctcaacaactgattattttgtgtgtgtgtgtgtgtgtgtgtgtgtgtgtgtgtgtatttttctctctctcaggtctatgcagatagccttttctcttacaccaatttgaggtattcatacccatatatcttctattactaaatacagtaattcaatggtaaaaatgacataagtacatcacagactatatggaaaaaagaaaaaacaatttcagtcatctaaaactgttactattagcattttggtgtgtttcctgttaatttttttagtcaatgtattggttgtatttttgataaaattgtgtgtattggagttttaaaatatcagttaattgcaatgtatctctcctcttctcccctcttcatgatccttcttcctttcttttagcacgtgattgttctcttctgctggcttcaaaaataccatacttagtattcccatttttctggccattctctctcaggttttgttgctgtctcctgatcttctacctgcttctctcaatgatgcaattccccaaagatcagtccaaggctcccttcttttcttactctatcctctcatctgagagtagctcatctacatccatggcttcacttgccttctgcatcccagtgattccagatctatatctctagaggtatcacatccccaggcataccatgagcacccatcactgtggccagtccaggagacctggagaacacatggcagggtcccaaagcctggctggccgagggatgagactgactctccagccccatggatgcacacatgttctctcgtccatgtgtctaactcccagtgggaaagtactcattcttcaggggttgagggaacctcttcagtttagtattgtgcacatatatggtaaaggaagactttcacatatggctggaacctcacattgactcaataaaatgagtcaggcagatagtaacatcctccactgacaagaaactaaagatcagggaggcaaagtgggctgcccaaggtcacagggctagctggtgactgcaaagtggaaattagaactcagctcttccgacctccagaccaaggtcattttttcattcaacgattattcactagaacctctttgtgctaggcacagtgttaagctctggggacagagcaattaacaagatagatgcagtccttgaccttattctagttggagagatagataacaaatggcaaaataaaaataagtaggctataatgtcacagtaataagtgcaccttgacctgcctgtacttacctactgattaatgctgctaatttattttccttggcaaagatgccctctcctccatttcttcctctagaaattgctcgttcagccttctccaataagaaagagttacctttgccaagggaacttgaatttcagtgttgctttgtcaattaaattgtgaacaaatcaatggagccaatcgtttggaatgatataaatacaatcacaatttgcctactccattcaaagctgcccttcctggcctcctactcccttgatggggtaagggaacccctccagggttccatccaccaaagtctctgaggaagatagcttcaccaagctggatttggagaccaaccctaggaggaaggactttctttcacttttcatttaaatgtttctacctttccgtcaaaacaccaaggaacgaggacatgctcgagagagacacagtgattggaatatggccagcctgggtctgcactatggcctgtttgggcagatgcttccataacaaagccacagtgcccagggcacacacgacgtgagggaccttgggggttacatcaggggccaacccaataagttaacattggatatcagcatttgtctctgactgcctcttaagtccctaagatgtgtcaggcactaagccaggtatagatgagtaggaaataattaagtgaatgcagaaggcatgacagagacaatgacataaatctgcattgggcccagagagaggctgtgagttctgtctggggcgagggtgcggggtactcaggaaggaatgaatcgaggagttgacttgaactgcatctttaacagcaggaggtgatcagtttgtagctgggaatcgggtagggtgtcaaggccactgtagacagagcaatgctagaaaaagagtcaaggaaggagtggtgtgtacttggggacagatggagtgtgaggtgcagggcgatgtggagatggaaggggagggagggctgctgtgagaaatgtggctggtggggtcagcacagaccacaccagaaggtcttcccagcactactgggagtttggacttcatccggaggcaatgcggaaccaccgaagggattgaagccaaggagtagcatgatcacatttgcacttaatgaggcttgctctgatggtggtttggcctgaagattaacatattgaataagagaaggaagcattcagcacatttttgttaaaggtcaatgtgatttgtttaaccaagcttgcacgaggaacacattgggtactctagcatgctgttattattgcattttattttattcggggcggtggggaggagtgaagggggaagtagaaagagaggcattccaggcatgactggagtaaagaaaaggaacatgttttgtttctttgagactgtaaccagcctttgtgctgcagctatatttgtggaaaagattgggggccgaggtatagtgtaggctaggagcaagagtcaaaggttatgctcagggatttatcacacacagcaggtttccaaaacaccgtagtgctgataccccagactccatccactgaggtcctgccaggagatccctctttgtccactccctctccaagatgcaacagtcatcagaggacataggcagcttctgctctcctgacattttcactccccactgtgttccttctgcaaatcttgttaatacttatactctaccttttgccctttttatatcctcacacagcagaacttggaaagacccagagtggagagtgtgagttttagactcacatcgcagttggagtgctgactttgctgctcactctccgtgtgtccttggacccacaggtaaccctctgagcctcagtttctacatttgcaataagcagatggttggagtactttgctcacggggttgtttgaggaataaacaggatcatgcttttcaagcacctagcataaggtgtggtccaggtttgtcacatcctcctaccctgccctggaataactactgctcctctcctcaaggactccctggcttccccagctgggccagtgccctccttttttgctgtatttactgaattagcttgtcaatcattatttgcctatttgactgtccctgctaagctgtgagccttcaggggaagggtttgcatcttgtatctctaagcccccaaatgccagcatgagtccaccacatactgggtgtttagtaaacactgctcgaatgaacaaatgaaatggtttctgctcagcagctctacctgctggcagtgttgggcaaaagcaagggaggaagagacgacatcatttatcagatgaggggaagcatctctgaggctccagtcagcatccttagcttaaatacatgctgcctaccatctcccccctatgtctcacaccctaagacatcagggtgagattgcctgccctgtttccatctccatatgctattaccatgtttccataccaaagactcctctaccttcatatttacattgctgagtcagtgcgcatttaacgtgtaatgtttgttttcatgactcatcatgctgcctcagaggctgccattaaatcagtgtctatcttttaggtattgggatttgaaagccactggctaactttctgcatcttcttttctctctgttgaagcttgctttgtatgtttgataggacagaagcagagggacccaagaaaagaacatgagtaaaacagaagttttcagccctaatgtcaaggcacactggggtgttttcagggctaactaggccaggaactagcttttagtcacaaactatcttgtccttgcagcatccagcagaaaaccattgtttggttcttgtcagcgttatcgtctgggcattatagacagaaagtagactgaggaccaatataccagaagggagattctcctctctaaacttccaaggctctattcatgagtaaggatggcaaagatctagaggaggtcagagttgtttgtgaacaaagatgcaaatttggggtgaagctcagaggccagtgggggagtgttcatgcatgtctctgcttgctttaaggatgtttattggtggaagtgaggacagatgttcaaataaagtttcatgaatagttttgcagagaggtttctctacctatcccctctttctctctctctctctctcagctctctctctctctcctctctctctctctcatatctctatcacctacttacctgtcatatgagaaaatagcttataaagggcaaatcctagatgtcaagtcaagagtcttaattcaagtctgagttctagtggtagctttgccagcaactcattcttccttcatggaaaagaatgtaacctcttacttgaggataccaaacagtcctggaaaattgcatcttcaggtattaaacattctatggatccgaaaccatctttcaacataagcaagcttgttagccaaatttatcttaggtaggtcaaatttttatatgagagtgttgtaattttgtatgtgttggctgtatctttatagtaaaggaggaccccttggatcttgaataatcaataagtgtagaatatatgtgtgtattttatcacccaattttattatttcaaatgactgcagaagttgacagctgaacctttggttttttgacatgttcttgatgaacctgtgatttatcttatactgagttcttagtcgtggttacaactcccaagctgactttttctttttgtaggagacgtacactatgataaaatgcctaggaccacttgggggagtcgggggaaactttccctcagtctgaacttttttttttcagtctgcatttaacaggcagcctctgttaaatgcattgtgcttactcatgtggaccactgatgagatttaatattgcccggcttcctgcttatgaagttcccatttgaagagaactattccaatgagaacaaggcacggtagtttcagagatcaatactggacttgttcctgatcaatatggaactatttggcaattttctcatatagaatgacatttcctcttgtaatctgaggcaaattcaactgaaatgaaaaaaggcaattactaaagaatgaagtaatatgatattttgttttacacaaacaataaatgataaaagggacctctgagaattggattcgtggaggtaagctgctcctgttctgttccttgctgacgtgagtaactacttagattgcaacatggaaagtggtgtgctgcgttttgcattctgtgaaagcatttccaaagccgttcctttgaaatgaaagtacaagttcaattaagcatagagaaaggcaccaggagcaatatgcttaaactccttggtgatatttcgtcacatttaacaccacgtccctctgaggagcggcgcataaaacacttcccaaagaactgagaagtataaggcagttccaagttgatctgtccttgcctacacatgcatcttttagctgaatagaagatctgggggttgggggaagtaaagcaaagttataaacaggtaagactgaaaaagatgctttaaagggcttgtgccacgtgtcaaagcgctgaatctgaaagctctcctccagatgccttcagtggtgtggttttatttccttagaggaaatacattaggacaatagccatatctttttttttccttattttttatttgagatggagtcttgctctgtcgcccaggctggagtgcagtggcatgatcttggctcactgtaacctccgcctcccaagtttcagtgattgtcctgcctcagcctcccgagtagctgggattataggtgcccaccaccatgcccagctaatttttgtatttttggtacagacagggtttcaccatggtggccaggctcgtcttgaactcctgacttcaggtgatctgcccatctcagcctcccaaagtgctgggattataagtgtgagtcaacacgcccagccaccatacctttttaaatttgaaatttgtgatcgtttggattcttattggactaaatgaatgggggcatgcgacactgaaggagaatgaagctaccaaaataatactgtcctaagatgttagaggaaagtgttttatatgcagtgttctaataactgttccctcttacccacttaagaagcctctttgcacttcattggtcactagtttagccacttgaaaacagcataaaatctctttttaaaaaataatgctggcttaatgaaattgggtagataataaaataagaatactactttttatttaattgggattctgttaattaatgccaattaattaacacaagaaaaatggagggatattagccttattccaatacactacgttaaaaaattaaaatacttcaagtaaattaccaatatctcctccagaaaatccattcggaaaatctatttttcaatgtcatgattttagtcttaacccccagtctgttgaaggggaatttgactttaataaaatgggttttctttagaagactttctaaattcagcccgaatttagttcaggctagtttttttcattgtcagtcccagttagagtgttttataagtttcactcagacatatgaaatctaagcttgcaaggaaagtaaagtagtagaatctcattaaatcatcaccatccactgcatggattcaagcacaggagcggtatttcatttaaaacaagcaaattctgttgactctgtgtcctgtattgcatttaccttcaacataatttttatttggcatcatagcaacctgcctcctcccctgagggaagctggatttgatagccaggtaccttaagacaacttagaaatacacgttcattttacacctagtttataccactcattgttcaggcatttgactcattaccttgtttgattctcatgccaaccatctcaacgtcagcattaatatcttcctcttacagatcggggaggtgtttagaagcttgcttaaagtcaggcaacaaaaggaagtggtagagccaggataggagcccagatctctcttcactagaacacactgcctcccatgggtgtggtgcctttaccagcatggcatttagcctccaaaattcccaatcctcttggcgagattctccctctttcctccttgtatgaatttcctggcattgattttttttgtaactggctcaaaagaatgattttgcacagttccccccctttttttttttcctggtcattcattctgtgcccaatcctacaaaccgggcaaatggactgtgtctcttccagctgccatgttgtgatttcaccccgctgcctccatgtgtgcagcagctccctgcaccacctcagtttgctgatgaggcagccacacgggagcctcttccagggtgggattttaaagatatctttagaagtgattttcaatcctaagtcatggagatttgagttgctctttcaaaagtgaggacatgtcccgcctctcttctctatttattcttactctcaggatttcaccaacgtttaaacgccatctggatgccaacgtcttccacatttatatcttcagttctccctcctgaaatccagactcatatatccaactgcctactccacacctcttcttgggtaccttataaacatctcaagctgaacatgttcaaaatttctgatttccttcccacccacggatacgcttcatccacagtctccccatctcagtggatgaaaatgtcttctttccagttgctcaggctaaaagtcttacagtcatccctcactcccctctttctctcacataaaacatcagatatattatcagatatatcagtacatttcttggcttttttttttttttttttgacagaatcttgctttgttgcccaggctggagtgcaatggtacgatctcagctcactgccacctccgcctcccgggttcaagtgattctcctgcctcagcctcccaagtagctggaattacaggcgcgcgccacaatcccagctaatttttgtatttttagtggagatggggtctcaccatgttggtcaggctggtctcgaactcctgacctcgtgatccacctgcctcggcctcccaaagtgctgggattacaggtgtgagccactgtgcccggcctcttggctttttctttaaaatatatccaattatttctcaccatctccctgccaatccccatcagcccggtcatggtcagtgccatcgtctcattatttgggttgctgcaatcctcttctattgtggactctgccccttgtagtctattctcaaccaagcaatgaggcgatccttttgtcaacagatgatgtcactctgcttaaattcctagattgactttttgttacaatgaccttcaaggggcagattttcagaagactgaccccctctagaattaatctctgtgccttctctggtgactatatatgtcagtaatggcaatgtcactgtgtccctctgaatgactgatttccactggaggtaccatgttcagggccaggcaggagttggagagagcttaggtcaggatgtacttgaactgccaaagttcccatcagttctgtggttagtatatgtccctttcaagtggaggcacatgcaaatagcaaaaagatgcttcttcaaactgaaccaaagttggaattaagagaaaaacatgctgacaagtttcatggaatgtgaaaacatcttcactgcaattagttttaagaccctggagctaagctttccttcctccttagggagaaagcatgataggaaggaaaagcagaggaaacagtacccaggaagacctgtatttggatacttgctcttctactatggaagaatatttttcaggaaatgttcacttcttcctcatcttcatctccttggcaggattttcatgttgagcttggccatatggcttgctttggcttgtggaagtggacagagtgagtgtgtgagtttcatgactaggccttaagtcacatcacttatttcttccctctaccatgagaactacttgccctggatatcatcttgatcctagaacaatgagagtcacgtggagctgagctgcttcagctcacttgcagacctgtagctggaagcagagccacccctaccaacccaaggagggagcaataagaaatcaatgcttatcattgaatgcttgtttattacgcagaagttgctgactgatacagccattaaatgtgtgtcattggtcaaatgacttcacctcttgaagccttgatttttcccatctgtaaactggggatggcaatcataccgctctgaaggacttcgtgagcactaggtaaggagcctgtatgtaaagcatagaccttggtgtgtggaaagtgctcagtaagcatcatctccatattcctggggctcagcacgttgcagagtggatactgcatctaaatgagcagagcaaattgaagctatgctggggtgcagttctgggtagcaacagtagaatgggcaggggtggaggttaggtgtccctcagtagcatggtagaaatggtggggtggggggttgatttctgtctctcgaacatttagaaggacagaagcaggataccctgatagggccccctgagttttcttcatcttaacctgaatttatgggccagtgctggcctaacctgctgcctgttggaaagcctcgggagggacttccagtcttatgtttcccacccactggctgtgttctagtgaatgactcctactccagactcccctgcctgccactgggctaaccttctggctgccctagggacaaaagagagctgtggttttctgctgcgcaaatcaattcatttctgccgcagtgtcctgggcaaagcagtgtcagggtcattctcatgaatcggccatcattattcctgcagtgctgctcccttcaggtatgtgacaaaggtcactacagaggacacctcaattactccctgctgaattataggagcacaaaattcctgttattagggggcctaaatcagctatctttccccatgcaggccaggatctctttatcttgctttggctcccctttcttttccctgggccctgagaggtgtagagtatgggggtcagaaggagagggtgctcctgctgtcttctatttgcatttctaggaatgtgtcttcagaggtgaaaagggtgtttaaatgtctgcctgccttctgcataaacaccttaacatggctcaagatccggctccagaacatctttcttgccactccctctgccccgtcacagctcctgaaagaggccattcatccttctattcacccaggccatcaccaatgcttattgggcgtgcctcgtcttaggcactgagacgaagagctgatgaagacagagttcctccctctgaactcttcaccggccttcagtgctctccaggttttgtgcatgtggctccccacacttggaatgcttttccttccctccctccctttcttcctttcctcccttccatctgtcttttccttcttccctgcctccccttcctctccctcccctctcttgctcctcccttggtggcacaagccacatcacttaatattaatcagaccagtgctgggggatgggtggtggggtggggaggaaagtccctctaatgattgactctgcaactggtaatctgttagactgtgtgttggggcttaatgtgtgatttcatgcattttcacggtctctaaattgcaaatccaagattatttgaaaacattttatttaattttcatgcttttttcatcaaaaaagttaaaagaataataatcttttatgggcagttataaatgtgctatttacacacaagacagaaatatctcccttagctgagcaatctaagtgtgtgcttagagaggactccataagaatactaatgagaaaaggcagaatatgcttggagacaacctaattcattcttctgggcaatgtctctctaggtggagcgggattctccaggttcattcctcagccctaccagtctcccagcctctgcagatgggagggacttggcagtgagcacgtggtagttgtagggctgctgtctgggccatctttacatccctggagcttcgcttggtgcctgtcatggggcaggcatgcaggaaatgtttgtcgaataagtgagtaaacggctgagtgaagcattctccatactctcccttggcagtccaatgtgagagctgtacacattcatttttttttcttcacatcaccattggagagagaagcagcagacacagctgagctcctggcttggtgaagggcatgccaaggggatgtgggtgcttggatgtttgccaactgtttttcacttttgtgagaatcattatttacctattgcttgattcagaatcccagacctagaaggactttagaaacttgaagttcaacttttttactttataagatgaatgacagagtcaaagtgaggaaactccttgatgaaggacaaagccaggacttgaatcccagtatcctactcgctcctaattaggtaaagacaatcttttttcctcatattatttctttcatctatgggtgtgtgctgtctcacccaacttttcccaaatcctgcaccttctgggattgctggagatgacagcagcatctttttccttcctccttcaactttgcactgttctctcttttctgcataatgagtctggggataaaacactctggaaacccaaggaaactggacagagtcctctacatccatgggccacacatgtggctgaagagagatgctatcctgtctctgcctggaaaggagacccagccacacacagagaaatggtctagccgagggcttctgtaaatgttgcgattggatccatagtacctgatgagggctttctcaatcccgtaattggcaaagccccaactgtgaccagctgacacggtggagcgtgtcagccagcagagtcccctggctcattaccaatctatgggataacgatgaccaccatagtcataatcattatcaccttaggcatggatgacaaaggcaccctagggacttctgcttgaaatgagctgcttcttagccaaaccctaatctccagagtgactttctacagaactgcaggatcatgaaactgaaaagggcccatggagatcatcagttctggcttcccgccttcaggcaggtctaacctttatagaatagttgctgtggaggaaattgaaccaaacttacttttatatgttattcttgtgatagtatctctgttgagcattcgattaagaaatgggtttgatgaatcagaaacctggaggagaaaagaaaatattaatgactgggcatcactcttgcaggacaaacatctccccgtgacattcacttattcattcatagttactgagtatctaccatgagccaaacacaatgacagctgcaaattcagagagcaaagccagagtccctattctcaaggacagcccagtctagagaggaagacaggtaagtgaacaaactgttctcatatagtgtgaagagtgctatgattgagtcattggtgtaatgatgttggaggaagaccagccaccacctgagaatctaagtcatgagtctgagaggatgggtagaagttaacaaagcgttctggtgatagagtgtgaaaagggatgaaaggcaaggaaaagcatttcatacagaaaatctttacatacacggacatggggaagtgagaaccaggcatgctcatgcaaagacttcagtgtacttggagctgagggtatggggaaggataggaagtgagcctagaaagattggcaggggccagatcatgtcaggcttttaagcaaggtagggactgacatgttaggaaggggaaattcatctacgtagagggtgagacataaagagtacccagaatagaggtataaggaaatggaaaaaaaaaaaaactgaaaagtatcactgctcattattgcatgaattgagtatatcataagccatgtaattcaatcaaccaaccatccatccatccagccagccagtcagccagccagccagccagccacccacccaacaaataaatatttgcagagggtctattatgggccaaacattgtaccagatgttcagggatcagttcccattttatgcctatgcccttatagcttcaaattcctctgttgggagaagaaaccaggtttccaggggcttcagcagggaaccatcattgatgagactgtgatgtggccctacataagaaaagggttttcttaaaaacacctgtttactcagccttttctggggtaccattgttcatcctagtcatttctctcctaccttgcttagctctgctctgtaatttatgtctcagtggctaatcggatgttgtgacacatcaacattttaaatctgatttatctgagggttggaaaaattgcagcagatgattattattattagataagcaacaggtaattttagcttggagaaagcacagactgtttattttccctccatctgtctccctttttgcggtttcctggctgtgttgtggtgagacacacaccaaagggagcttggtgagtgacaatgcccagtggaggtaaaagtccatccctaaatagaaaaagtcccaaattgaatactgctgctcccctcagtgctatattcaacatctactttgacatcctcttcagccatttaaaagatagcttgaagcctgctcctggtgctgatgcaccccatgaaagaaagatggctaggaatatattgtcgtggcaggtaaggaatctgttatgtaccttacttcctgggtgccttgagctcctggtacctggtgagtctggtcagcccttgcgttgggagcagaccattttgagctgattaaaaataattgaaaaatttccaaagtgcacacagatgatttgtgggctctagtgtgttggctgcgtgggtgagaggataaaatatgtacttggtataagtgagcttaagtgggaagttaatggtgtgtgattgagcagcaattacagccaaatctcagttccctgtggtcacagcaagggtgggggatttgtggaggacagagataaataaaactcatagataagcaagtatctccttttagagagtaactccagcttttctacggctcagcttttagccagggtgataactctaggactaaactaccaggatgtggggcttgtcatatcccactcctgcccaccctgctgggaagggaaggcagagagttcagaaggaggggaggacaactacaagaggctgtgcacccttagggaccaagagctttgttcatcttacttctggataccagtgcctagcagagggctggcctgtagtacctcatgctccatcagagttttgagatgagtgaatggtcagtcacagcttaaataactcatggtggagttgattttctgggagttgattatatggagggaagacagaaatgttgtggcttattttgagatctagcaagaaagtttcaggtctgctcagggaaagaatggcttcatccctaggagctaaactgacctgagaagatgcaggagctagttattatcccttcactgacctcagggtctacagcctaagtttctttcaacagcctgtgggcaagcaactaggacttgcaaaccccagctgctagtcaccagctcggtaggaatgaacatttctgtaggagcttgtgaaacacaccagtaatttgttgttggcttcccagtgtatccgtcactctgtcagctgtcatgtgcctgtgcctccagaatgacagtcactgactcaagttttcagacacatgaggtaaagtcaggaccaaggccgagacactctccaaaggacaggaattgctggggcaggcaggatttgtgctgggaaagtcatagggggaagtgagctcctggacacacatgacaatattgtgacctatctacggcttcacagtgagtgcagcctaggttgaatgtacaaattggttatcaatgccataatcagggcttgattaagagatacaggaatttgccctgtgcttatgagtagcatggggttgtggggagtgtgggaagaatgttttaaaatgtcatgtactcccttcttgccctcacttgctctctcccagctctattggagaggcatagaatgagtaagccattctttcatgagtattaaagtcagggaagacttggatcctctcctggctgggctgttataagcgacatgaacttgggtgaaatcccaaaggttctctgaataattttactcatctgtaagatacaacacgaatgttcaacctctgagtttattactaaacaacaaaatagatgtaaaatacatatcatagtgtctggcattcagaaatctactgtttattattccagggtttgtgatgatgccaggagataccattagaatctgtgctgggaccagtttcctttgagatgtcatgtcaagtatcacaaaggcatgaaagcctaaaaatatgcttccctggccaaatgtcccttcctctctttgttaatgacaaaccagaggaggttgaggttagtggccagggatagcaacatgccatggatgccccatccagcccctgcccagtgcataggtctgccctgatctgaccaaggggagggtgaggaagttaggagggggcatggcatggatgaccagggagggtgaagtgcctatggcacggggtaattcttttgtgggggcggggagagggatcagtgccccaggtgcccattcttctgagtaataatgatgtcatcatgacagccctgttaaaattccctggtggcagttttgatctattgatcatctccatcagattcccaattccgattggggcactttctctaatgatctggccaaaacatccccaggggctagcatggtgactgctaatgtttggaactgccacacattgcttttttttaatttttatttttctaattagaaaagcaatttctttttttattaaaaaatttgcatacctgcttctctctacatctgctaaaatgttaaaggtaattagtatttttttttaaacaaattagaatgtgattggttggagattttatgttgtcgttgttgactgttagggagatgtggagtttcctcaaaatgtcataaagtcagtgtgggtaatcttattaccagggaggcttatgaaggaacgggagagcgagagagaaagatgatgctcagagcaattgtgaggaagctggaaggagctatttagtgcagtgcctggaggggagagacatctcacttcttcctatgtttacaaggggcagctgaatggtgaacaggactttaatcctgtggggcattagtgagccacccacccttctagtattatatccttctgatttcactgcattaggtgggtcctaaagcctgtccctggatctagccccctttttctttctaggacagaagctgcttgaatcctcaggcccagatgctctgaaatggagattatcatttttgcatctcactgcagggggcctcatttttcataaatctcatgtatataaaaggcaccatcccatagttttcttaggcatggatagcaccccttttaatatttctaactccaacagagaccgtaaattggtattctgattgaggtggggatggtgagaagaatgaaggaatgcaagagacttacttttataaatatagaaactaccaccaatccatttggactctttgcagcttctgtgacattcgtatatagctcatggttatagtggatgagctgcacctggcaggagggaaaaacaagaatcagaacaataatccaacattaaaaggtatgaggcatagcacctgcccctacataagggtgaactgcaaagtatattgaggaacaatttggaagacaattttaattgaagggatttcagagggatgtgtgtgcatatgtgtgtaaaatgcatgtacacgcacacaaaaatacccatacatatttgcaaatgttttctggtaacaagcatgcttttcataagctcagagcccatctggctctggctccatcccaggacatttcccctaaagcgtgtgtaaagtgaattttccttattaggaacggaactgccctgtaggggtggatgttgtgtccctgctgcaccaccaacagctgccactggcagccagtaaatcttccttgcagcctcggagcaaacagggagctgttaggtcctgagtcagccatgactgggatgaaactggccagcctgcaagatgcagtagtagctgatggatcaggcttctgatgcaccagcctgtcccggtcatctggttgtgtaggactttatttcctcctcattcaataaggatcagtccacctgttgagcctttttcctgttacttaatttttttaaattcatttttaaaaatcgtgtataaacatacatatatgttcaaacagatgctccagcaatttttagccacatgatcaagttaccccacatcactgggatcaattgtttcctctgaaaaatggatatgatgatctttccttaaaattcatcatctcagggctgtgattttaaaacagttttttcttaacagtatggaagcctaattttttttttttttttaagttggagtctcgctctgtcacccaggctggagtgcagtggcgcgatttcagctcactgcaacctccgcctcccaggttcaagtgattgtcctgcctcagccttccaagtagctaggactacaggcgcatgtcaccacgccaggctaattttttgtatttttagtagagacggggtttcaccatgttacccaggatggtctccatctcctgacctcgtgatccacccgccttggcctcccaaagtgctgggattacaggtgtgagccactgcgcccggccagaagcataattttttaacaaattaaaatatagaagtaaaaaacgtgatgccccccccaccacctctttctaattctagtccatgctatacatacaactattaacagtttagtgtacatccttgtggttacttgttttgtgcttataagtcacacaaacacacatagcgtataaaaaataataaattccctagtccacagtaactgttaaaaaaacagaaagggatgattaataattatgattctgaacttgattttttaaaatttaaaagtagtttgtagctatctttctaagccaatgcatatagatctccccaagtcttccaaataactatagaattctcagttgcacaaacacccataacatatttaaccatcttctcgctggctttcgtgttgtttccatttttttgtctcttataaacaatgtcacagcaagcacatcatatatctttctgtaatggtgttagcattttccacaggctgatttgagaatccaataagatagtgcatgtagaagtgatttgtgactctgaaagtgtaagagagtactcattattgccaatatcttgaattgcattaaaaaaggtgaagttttagaagttgagaaatgtgatgatcaaaaaagatgcttttccttgaactttgagaaaaagaaaccatatctaacccagtggtttgctaccttcactgtgcatccagatcacctgggtgcttttaaagcccacctgtgcctgtctatgccttctcacattctgatttaattgatttgggatgatacttgtattcatcaaaagcttaccagctagagggaagttggacttcagaacaagtggaacataatcaatgaacattaatatcccatcaatgcctagtcagatggacagtaccttgaatctgagaatatcctgagcctcctgaggtgtagaggaacttctcatgaagagagcacatgttactgctgctcttgaaatatcctatttgcttattgctttttcacctatgagttttgccagtggagatggatgactctatagtagctactctgccatcagaaaggcaaccgcaggccaggcgttgctctgcctccgcaggacttttaatcccccctcccttgtacccccacacaaccaggactttctgcaggtggagaaatgttgccaggtggtggaagaaccagggactggggggttctcacacactcagcacacctcccttccagtgctgagtaagcttctaatgagaacaaaacacaccctgccatctgctaacttcttcccactgatacaggtgaccaacaaaactgccaggggatgtgccagtgcttccagacatgccttgaagttaaagcatgttctgaacagaggagggacatgaaaggcaatccagtggagtgatccttctgtccagcttgcaaggcagaaaaaggcaggaagaagtctcctgggccatgggctgcctctcagggtggggttcttttgggagccaggaactgtaagaaaggagctggcaagtacagggctgaggctgtgctttaagcttgagttaacacatttaaaactttgatctgaagtcatgcctcctctctgttccaaggtgagttggctaggattctgatatcaggagctttggtttctattagtagttgttgatggactgtctattgtgttaggttgaaccacatgaaattgatcttttgctttacaaaactggtgaatttatagttaatacattctagaaataaagctattttgaatatgagttttgagcattttctttctgacccccagtcagatgttaataagatgacagtgtgcgctctagggatcagcagcagccacagcatctaggagcttgttagaaatgcagaatcgggagccccatcccaggtctcctgaatcaagatctgcattttctcaaattcctagtgatttggatgcacgctaaagtttcagaagtgctgctatagcagatactgttggctggtgagcagagtcctgttttgtctggctgtttaccccttctccacttcaatttgggtgggttaaggagcacatgcatcacctatgttggaaaacaggctgagtccagatcataggacccctggaatgtcagcaatagaaaggctttgagcaggggaatgagataatcagcatggactgtaagagggtagattggagccaggagaaaatagaggtggaggttggggggtatttaatttcagatgatggttattaaggcagagatgtgctctataggcctttgcagtttacagaatgtgtatgtttgtgtgctgaagaggcaccaggagatttccccaggcaacagaacatctaggagcaacagaagagcacaggagacagcttgacagtcaccaggctttttgttctcagctgtaagaacacagtttgggcatcaaagataacctgggacctgtatcagttcatgcatgaacagcaggtcttaaccatgaaaaagtgctgcttcctttctactgccttccaggtctttgttggtggtgatcacagttcctgcagctgttgcctttgctcttccctagccaggcacaataatgctaacccaatacccactaaccactcacaatatgcatgggtccaggtgggtctggagaaaagcagggttcactgcttctcctaccatgactttgggcttggggagcagcaatgtgcaaaccacatcctgctagggacagagtatcagattggcagatgggttctgaaagtgatgcctgtggatggatttctttttgccatgtataggtaacacttttaaatctcaaccatataaagtctgaattttgaataatttagatgggccctaagctataccttaactgagccccaactttaaggcttatgcagagtaatcacagtgtctgatgtgaaacagatgatcaataagtgattgttcaactgtctgagcaagtgcatgatttgactaagactgcagggacaatgagagcaaactcttcgggggctaatgatgacatgctaattaaacaccaagttcaagttcaagaatttaagctattcattaaagagatgccttgagggcttctgctagtttagttggcattaccatgtgaaagggttaaacctggattcctggaaattatttaataatcttgattttttaaattagttttaggcgagtatcctcctagagaagcttcctggaaatgcaagactgagaaatggcaggcagtcttccagggagaatactaccagtcttgtcatgatgctcccacatggctggtgccatgatgcagtgcattctctatatctaagaagtcctccatgatctgatgtgacttgacttctcatttcagaaaggccacctcacctcaatcctttacatgggcctggaattcatttgttcaaaaaatctttgagggccaactatgtgctgaggtcaattggaataagactgagaaggtctttgtcctcctagagatagtttcagatggtggcaaagatagctttgaaggaaacaaaacaagattttgacttacttacagattgaaaggtagtagtggaaagaatgggggcgaggatgcagaagtgggggcaacattctgtagtatggttggtgaaaagtctttgggtaggctaacatttgagctgaatcctgatgaccaggagccaggtatgggaagatcagagggaagcatatcacttgtagagaacacggccaatgcaaagagcctgagatagggacaagcggctaggaatggctgggaaaggatgaaggtggctcaagatgggaccagttcatgcaaggctttgtagaccatggtgaggagctttgattttattccaaacacaataggaagtcacaggtgttaaataagaaaccaattgatctgatgtgcatttttgaaagatctctctggtgtggaggagggcaaagtggggactgaggaagccttgcctacccttctttacctcatagttcagctgggattgtgcccaattcctgcgactatttgagttcacattcaagcacatgctattttgcaactattctctttgtgtcttaccttctccaggacaccttccatgaaacactgtctctgaacaccaagtgcagctcccttctgctctcatgatgctctcacccaggaggcaaatttgtgatggttaattttatatggcaacttgactgggcaaagggatgcccagacagcaggaaaaacattatttctgggtgtgcctgtgagggtgcttctagaagatattagcatttgaatcagtaggctgagtaaagaagatctggccttatcagcgagggtgggcaacatccaatctattgcaggtatgaatagaataaaaaggtggaggattctctcttccttcagctggggcatccctctttctttgcccctggacatcagagctcctggttcttgggccttcagattttagactctgggacttacactagcgaccacctctctccctgtggtttgggattggggattacaccatcagcacctcctggttctccagcttgcagactgcacattgtgggacttcttggcttccataattgtgagccaattcccacaataaatctcctcttatatatctatgtatatagcctactgattctgtttgtctggagaaccctgactaatcaaaattcaaaatactttgcaaccaaaatgggatgggtaccgggtgatcagaacagatgtaaaccatagacgcccagtacagtcacatgagtgctgaatatcattgttaaagttagtcatcatcaccactttggatgatcattaccaacatttgtcgaacacctctttgtgtgagagacgatgccagcagaaacaactcatttaattcttgaaaacttctatgagttagtgccattatttccatttgagtcatggggacaccaagcctctgagagatagtggcagaggtgggattgtgcccagttcctgtgactatttgagttcatactcaagcacatgctattttgaaactattctctttgagtctgtgtctacttttgggtaaacatctcaagggcatggatatccatcatcacatccctggtgatgggatttggctcagaggagatgttggcaagcatttgctgaatgaataccaattctgcatctcatagaatcttagaaggggtcttagagaaaatcaaggtcttagttctcagcccatgacttttaaaaatgaagaaaatgaggatcaaagaggagctatgtcttgcccatgattatacagtcattcatagatccaatcattcaacatgtgtttattgaacaactcctaagtaagggagggtgatatgaggagaaattgtattggaaggcaggagaagaccatggagagcttggcaggccaaggtagggggtcttgattccatcctaagggtaacgaagaatttcacttatgtcctagaattttcttaggaccagaggcaaagtttctcctatgcacttaattgaagtggaagcctgaaaaccattggcctttggtgaccggtaactcagctttcaagctaacagacaagtactcctctgtgttaaataagcagacctgctgcaagcaggcttccaagttgacacaagccacacttgtcataggttaagctgggagcagcttcagttgcacaggtctcagagttttcattttgtggtagcaaggtgatgcactagtgcatgccgggggctgctcactcacccctcatgcctcaggagggcaacaggctgtgttctcagaccttagatcacctttctcagcgtgatgctccattagcagaagcccttttgtgagcgcaaaagagcagccttggaacagaagaccacacgtggcgttcacagtgacaatgctatcaccttacccctgcttaaacacctcagtggcttccccttgcctgtaacataaagatgcacatctggggcccctggcttttctaaccatgtgtccttgttttctgtgctctgctcagtgtctttctttcagcctcccttatatactgggcttcctcctttcctagaacacatgcttattctgtttcttatgcttcccttcccttaaacagagaagggagggaataaacttccctcccttcactgtttgactcctacttatgaactcctttgtatctcagctcaagggtcacctgttgagggagatccccatgatccactgtcatggcactctgtacttttcaaaatacatatcacagttttagcttgacattcgttgtgtgactgatgaatgctcacctctttccctagactgactttaggcttcatccaggcatgggctctatcttattggcccctgtgacatctcctatacctggtacatattaactgtatcaaggcagaaataaataattgttaatgaatgaagcaatgcaggctgtctattgtacaatgaagtgtgatgtcccaagggacagagagaacaaggcgcttggctgaactggttaaagaacagtctggaattccaaaggttatctctaatgggaaccaagacactgagtatcacattgggctgcgtgggttgcaaagcctggtttcacccttgggtccccttacatgagcaagtctctcatctataagagggatagtaataattcataactaatactcatagcactgtgtgatgattctataaaaccgaatataaaaaagcacttagcccaaggcctggcatgcagtaaccattccatagtaagctactattgttgttgttatgcaatatttattatgcaagcaatagataatacagccttcagcttctgcagaaataggggttaggtatgtgcaggtctcctttgtggatccgacattgagtctgttctcccaaggaaacttgaggaaggtgtcacctattggggagcacccactgtgttccagacactgaatgaggcgagaacttttaaagagaaatgcattccgaatggctcatactgtaattcaggggtcagcagactttttcctgtaaagattcagatagtaaatatatttttctatgccaactgtatagtacctgtcacaactactcaattctgcttttataatatgaaagcagtcatggacaaaatataaaagaatgggcgtggctgggttccagtaaagctacagaaacacagcgtaggctagatttggtctgtgactgtagttttctgaccgctgctagtttaaatttgggagatgaataaagaacttccagtcatatattttccagtaagtgttctatacagataggaaaatacatgttgagagaacctaagcattaagctctccctttcctttaaatgatgatgattactattgttacctttatatagtcctttaaacttttcaaggcatattcaactcaaatgagctgaattctagtcaacgtataggtcccaaatgcccaccctatgccagatcccagaagtccagagatgaatgctgtatattccatagcctaaaacagctcacccatattaccacatttgttcctaaaataaataggtgaagtgaagacattaaggcacagagaggttaagcacctcttctgaggtcacacagacaaaaagtgacagtgactattcatttcacattagcatatgcaaatagtttctttctacaggaaagtaaagagaaaaggaaaggtgttctgtatttgaggggagatcacatttcagcagcttttgctggaacaactataagctagaacttatttatagaaagtcattaacaagtttgtcttcatgcataagagcacacacagtctgcagagaagaacacagtttgatgtttaccagccaccacattctcaccctaaggtttggtaactatcatgggtctgtccggtgatgagattttctgcattgtaggctatggaatgcaattatggctaaaaataaaaataattttccatagtttcattgacagaagatccccaaatgtggtctggctatcataccaacctagaaaaccagcatggaatgtaattattttcccccaaaagataacacaacttggattttaaagcatgtttttcatcaagttgtatgggagtttgcacaaatgtagagtgatatatttgggtgcaggatcatgctggaaaatgcaagaccttgagcctagtcagatacctcttctgtccaagtaatgtggggctacttatcccctctgattatttctttatgcataatatagggatgcatctatctaagaattgtcatgagagtgaaacaagataatgacacagtctttcaggaacttggcagggtataagtaaacaagataaacagatgagataaaacacataaagaatcagggaagttccgtgatgctttttttttttcccggaacttggaatgcgtttcgagaccactttttctcgattccttccccaggccttcgcatccttcaacttcttataaaggagctgctgaaagccagagtgggatgagcctcctgcacgacgtctagatcctcccagaagtgacttgtaggcagtggctgccaccatccaagaatgagagatgaggtctgcaggtccttttgaaacttctgctgattttagttaagcctatttcttccccatgctcctgcaacctcaaactcatcccaacacagggcatggatgaggagagttaggctctggctccaagtcctgggtcttctggtcttctttgaacttcaatttcttcacaggcaaaactgtgatgacaacataaccactcaaataatcgtgctgattaaatgaaccaaaacatgtaaatgagctcaggtgtacatgggataaaggaggcttcaaatgcagtgcctggcacaaagtaagccctcattaaatgggagttgcagtgattattattagaaatgtctggctgctggggctctgataaagggagaggccctagaatgatgaagtgacgtgttaagttccatagataacaacaaagtcaggccattcacactttgggactgtatttcttgacagtccatatatcattcacatttgcatcttactttatcttattgtcagatgactaccaagaagattttgccagtcttttctttctgtagctcgtattcttgtattatgaaaatagatatactgaacatgtctcataccaaataccttttctcttttaggattgttgctatttctgtggaagagtttgtcccatgagaaccactgtactggtatgtgtagggcatttttgttaaatattaagtcattccagagcccacataaatagtattaataaaggctcgctttgttttaattattgtagagatttaatgttatgtagttcatttgagttaaggcaagaattatttttggtcatctcctacgcaaaaaaaagcgttggtctagatgggtttataagtatattccagcagatatttgaggggaaaataggccaatatcttttacgatcatatatgcaaaaagccaaaattaatactagctagtggaaaacagcattaaaaataatttattacaatcaagtagggctcatatcaggagttaagggtaaatcaatgctggagaaatcttccaatgtgatctagcacatcaattgaatgaagcagaaaaaaagggacatgaacatctcaatatggagtacctgtatttagatagagctaaccaaattaacatccattttagtggaattacttctcacttaaatggatgaagtatacaaaaaaaaaaaaaaaatagaatctaatgcttcaacctgatgcctgggatgtcttttgcctgaggtctgagctctggagtgaacaaggaagacagcttctagatgatcatgagacaattcaggccaaagcatgtctctgtgatgctgagaaaggctctgaaagcttcagcaatgtggtgtccagagggcaatgtgattgaatgatatttcgggagaccacaatgcgaagttttatcctcttatagttattcataaaagtttatagcttcactggtatagatataactaaattggagaggaatgtgatttttcaaatatccaggggcaatgactctcagtacctgcagtagatgcacaccaaggggttgacggagaagacttttctagctcacttcacagttagtccccatcctggaggaaggaaagactgaatcctcacacactgcttgccaaagccatcttattcactcagggttaattcagaagagtcactttaggtggctactgtcctaactgatatattcatggaaaattagacacataacatctattagataacagaggagggttttctctcctctcataaatgaagctgcgcagcgatttggataaactgttcacaaaactaggcttggttttgtacacattaattgcataaagtatgatacttaataagcagaaacacacactggtttatttcaaagccattaaacccgcagtggattgactgtaggggatgaatattagaaagagcacagggctgggagtcaaaggggctgagtttgaatgacagctctgtcattcagtaggtaggtgtgctcggtgagtcactgctcccttttagacctcagggtctttatctggaaaacatggagattttaaggacagggttttgtcattcttctaaaacactgatgggaaatataggatgttgcctcttgagtttccatcaaagtcaattaagttatagtcacatgttgcttaaaaaccaggatgcattctgagaaatgtgttattaggtgattttgtcattgtgtgaacatcatagagtgtacttatataaacccagatggtatatggtatagcctattgctcctaggctacaaatctgcacagcatgttaccgtactgaataccataggcaattgtattgcacacagtggtaagtatttgtgtatctaaacgtagaaaaggctcaatcaaaatacgatattgtagtcttaggggaccactgtcacataggcagcctgtcattgaaggaaatcttgttaggtggtatgtgactgtatgtagaattgaaaccaaatatttaaaccaaagtttcagtaggcagcatgtttatgcctggggttgcaaatggatgactatgggaccaggctgcttgtctcaacagaggagaaggctaggcaaaggccatggccaaaaaatatgaatgtgcagcttagtcccagggtctcctggcagccactttgtgactcctggtttcttcatttgatcgtgcttaggtcaaatcaaaccaaatccaaacaaaacaaaatatctcaaaccttcactcattgattcttccaacaaacccgtatgtgtttcccatgtgccaggcactgtgctgggcatgaggagatgaaaagagggaagaccttagaggcagtaggaggcacatatgcaagtgtcctgtagcatcatggaagaccatgtgtaagaggaagaggctggagcccagaagggaaggggaatgaggtaggctgacccaggagaaaaaggtaaggacagaccacattcatgcttggagaccctggtaagaatattgtctatcctcagaacagtggaaagtcatccaaagtttgaagatggagaagggggttgtacgtgcaggggtagggaatgttgatgacagcaggtttgtttctgacactcgattgaaaactctagagggaagtgaccctttactgtagcgccttttctcaatgtggtgtctgattcttccagaaatcacattaccaactgcctgccaactttcccctattcctgcccttccagagcctgcccaggttcttggtgagccaggtattcctaatcctggaatcatatcactcaaatttaataacctctctcatgtgccagtacttgacaagttaaaagtaatttgaatatctgagtattaatattttaactatacaaggcaccacaaattatttagtgattttttaaaataaaaaagcaaataagaaaatgatgtatcaattcagattgcagggaataggagatcccaacacaggcttctgaaaaattgggaaaagcacccaagaagattataaaagatgactaatgagcacaaaacaacttttggcaagcacaggaaagtattagcttattccaagaaacaagacacatttcatccaattattggaaaataaatggcaagaaaaaccaaataccaagaaagtacccacatttatgtggaaaagtataaaagcaatgattcaggaactaatttgaacaatccagggatagtcatattgattccagcccattgctgcaatttgaaatgaagccaaatgccagaggacaatgagatctgttttatgggctcttacatgccacataggagggagggagccacaggaatgcaccacattgaaaaaggaattgtgacttctgatgggagggcttttgggccaagttaaatctcagaatccagctctccccctgctccccagacagtgttgctagaggtcaatggacagtggggtctgagcaagtcttcattgtgtgtgattgccccttgcttgcagggcctttagaacctttgcaccactcccactaactgcttgcagtacttccatcatgatgtcaatcccaaatacctcctacccagtttaaaacagcccttgtggtatatatgtgtgtgtactgcccagatggagggctgtggctaggaaagtcagtttccctatccgtaaattggaagaatgattgatagctccttgtgctacatatttctgctgagcaagcaaaaaaaaaaaaaatgaccttgggttagaacatccttcctgctgcactctgtgtggtcattgaatgtcacttctgtgcaggatgcagctgattcttttctctcctagtggattttgttttacagagggatctttggtcctgtgactgaaaggtgagttgggggtgacagtggggaaaggagacagaaggagggagagccaaattactctcactgtactgcagggaagtccagatggtgcccttgtcctaagcttccaaaatatgctctgggagggaaacagagacagcattttgctgacagcacttgggaacaggcgtgtgggcactctatattaagacttcaatatccattccaagtgtatctgtgtgtatgtgagagcactgtggctttacttggaaaccaccggtcccaatctctctggggcagattccatttttcattctttcctccctatccttgtaacccaggcccaaccattcagcaaagggtctacccccaaataccatggctccctctggggcctctgtcttttgccagggcaaaggttgtttccagtagaactgggtcagctagagggaaaggtctttatcccttgggtagccggagtctgaggcattcccaagggcgagtgggtacagtgtggttcccatccacagagtggtggcatgcatgccatgccagctactgtaccagggaggggcgatttcaagaagagactcagtcttggcctcaagcatttctcagtccagagagagagagagaaacccagctcttgcaggcagagctttataaattacaatgcatcttcctgcccacttcctttctgaacccaaacaatagcccttctgtgaattaggccaggatgctttgaaactgtctttcagacaggaggagctgaggacccaaagtcactcggttgtttatcaacagatctagacttaaattcaggtctctgattctcaaacacagtctaatttcgatctgtagacttggtcaagctgctgttttgtccggtgtactgtcctgatattgagaggtgacaatgtgctagcaacccttgctcgctctcgggacctcctcggcctctgcatccactctggccacacttgaggagcccttcagcccgctgctgcactgtgggagcccctctctgggctggctgaggccagagccagctccctctgcttgtggggaggggtggagagagaggcgcaggtgtgaaccagggctgtgcctgcactcgtgggccagcgcgagttctgggtgggcgtgggctcagcgcgcccacacttggagcggccggccggcatcacaggccctgggcagtgaggggcttagcacctgggccagcagctgtggagggggcgccaggtcccccagcactgctggcctgcctgcaccaagctcgaattctcgctgggcctcagccacttccctgtggggcagggctggggacctgcagcttgccatgcccaagaccctgcaacctcatccccgccgtgggctcccgcatggccttgtggtgcccggtcccatcaactgcccaagggctgaggagtgcaggcgcgggaccagatggcagctctgccgggcggcccagtgtgggatccactaggcaaagccagctgggctcctgagtcgggtggggacttggagaacttttatgtctagctggaggattgtatatgtaccaatcagcactctgtgtctagcttggggtttgtggatgcaccaatcagtgctcagtgtctagctaatctagtggggacttggagaacttttgtgtccagctaaaggattgtaaatgcaccaatcagcactctgtcaaaacggaccaatcagcaggatgtgggtggggtcagataagggaatagaagcaggccgccccagccagcagtggcaaccctctcgggtccccttccacactgtggaagctttgttctttcgctcttcgtactaaatcttgctgctgctcactctttgggtccatgccacttttatgagctgtaacactcaccgcgaaggtctgcagcttcactcctgaagccagcgagaccatgaacccaccaggagggatgaacaactccagatgcaccacctttaagaactgtaacactcactgcaaaggcctgcagcttcactcctgaagccagtaagaccacgaacccaccagaaggaagaaactctggacaccccatctttgaaaactgtaacactcaccgtgagggtctgtggcttcattcttgaagtcagcaagaccaagaacccgccaattttggacacaatatggtttggctgtgtccccacccaaatcttatcttgaattttagctcccataattcccacatgtgggaggaacctggtgggagataattgaatcacagggtggtttcccccatactgttctcatggtagtgaataagtctcatgagttctgatggttttatcaggggaaacccctttcacttggttctcatgccagctgccatgtaagatgttccctttgctcttctttcatcttccaccatgattgtgaggctcccctagccacgtggaactgcgagtcaattaaacctcttttctttataaattacccagtctcagcagcatgaaaatggacccttgcctgaccttcaatttaaaagaattatagtagctaccatttaaggagagtttcccatgtgccagcagggtcctcaatgccctacagaggtcatctcattcagttcttacaacaggtgtacaggcagggattactgtccccatttaccagatggggaaactgaagtgggggaggtgaaataacttgcttgaattcactcagtcagtaaaaggcagagccacatgttagacctggtttgtgggctttctcaccaaggattgtggggagcttccctgattgattgggtccgcattccttttttttttttccccctggaatctctgggacaccaactcatgcgtgaatctggggaattaatcttctcttgttgggccctggctgaggggttcagtgatccctgagctccattccagctctttctctggatttatctgtagcatccatacttccccaagtttccaggtgcttgtctcttatatccacaatgagtaacaccaccactagtgaattctagtgaacattattgggctataatgtgagccagggctgtgttagcctgttctgatgcattatctcatttgatccttgcaaaaatcgacgtatgagaaccttatcacctccaatttagagttaaggaaactgagccttagagatgctaagtaatgtatccaggtcacacagtttttaatagaacaagagcttgtgtctgatgccaaaaacaaaatgttaagcactaagttatctggcctctaatagacggaagtgctctgggacttgggattgtcaatcagacttagggggtggctaaataaatgaacccctgtggaatgaagtccccttgcactcctatagttagtgttttacttcatgtcagctgtggagaaataggcacagctggcttggtgtatctgtcagctgttaagtctcaggttctgtcttctaggtaggagctaccccaggcacagcactaaccctttcctgcaggttctgattgggggccggcctttggctcttcccggctgctaatgctatctccttcccaccttcaaggctccctgccctgagctgtccctcagggttctccatagtccaatcctgacttttccagccttctctcacctcctcctttacaacatacacctactgctgaaggggctttttgatgccccctgaacatgactcacagtttcacacatttgggtcattttttttgtttttgtttttgtttttgagatggaatctcgctctgttgcccaggctggagtgcagtggtgcgatcttggctcactgcaagctccacctcccgggttcacgccgttctcctgcctcagcctcctgagtagctgggactataggtgcccgccaccacgcctggctaattttttgtatttttagtaaagacgtgatttcaccgtgttagccaggatggtgtcgatctcctgacttcatgatccgcctgcctcggcctccaaaagtgctgggattacaggcatgagccaccacgcccggccacatttgggtctttatccatgcggtttgtctctaccaggaatggccattgttttggctgtaatttctgttagtggaacgcccctcctaaattgctatctcctccatgctggccttctggattttcctgtatgaatttgctgtcttcctccttttgaaatcttgtaacattaaagtaacattaaaatatgggcttgactgtgctttcaatgatagcttctctgcttgtagcagttcctccatagcctgtaagtagtaagaagagttacaaatctaaccctagccttgccacttcataactgtgacttagggcattgagttaacctgtctgaacttcatctttagggtagagataatactgtttatttccccagttgttgtaagaattacataagttagtgcatgtaaaacacctagtatccaccagacatgcaataggcactcaagaatcttaagttacccatattcccacatttcttattacctcttcccccaaatacacacagatcgtcacacacaaacaatactactgctgctaccaccaccacgatgatggctcaatgcccagtgtgtacaggatcacagcatgctagcgctataaagttccctagcagcccatggttttagtcactgttttgcaaacgagtaactagcacctgggttgggatcagctgccctaagtgagtacagtattgcagctaacatttactgggtacaacaccaaggcattgtacttggtgttttataagcattatcttatttgagcctcccaatgaatcccctgtggggttaggtaataacattttcatcacccctattttgcagagtggtggggggccgggggaccaaaacttagaggttaagtagtttacccaatatctcacttttctaataagttgaagagctagaatttggaccccaggagcccaatatcagatcctggctcttaaccagaagccagaatgaaagtgaactccagatagcctgcattattttaagagtcctctccagtgtctcagaaagggcttcagaaattcagaaaaagctcatttcttgattcccatgccagggctatctgcccaggggagctgaattgaacataaatgaattctaccagcccagatccctcaccctgccagtctcagtcttctcccggaaaagttaaaatgagttccctgagctctggctgctttctagtggggagggagttccagtggctttgcaggaggggagacttggaagaactccaccaacttagtttattccaaggcatgcccaagaaatggattttcttgactctgtcttggctgagacaaaacacacacctctcttgttggtctttctgagttgaacagtcttgtggccttaatgcctatcacattggatggtttcaggaaagggccattctttgctttcttggtccatgaattcagagctgggttgagcagtgatgagaaaatgaaccccctagccccagccagccctggatcctctcttgagttcattctcctttggcatttggtaagcaggaaccttgatgtcccagatggtagagccaagggatggccccaggcaattcatgcagatacctcagctggttgtagtgaatcattgtgtctatgcaagaaggacttatgagcactcagtgggaattctgtacttcaaatagcctattccaagtcaagctcattatcctgccaccctgaactctactccaaatctcctcctcttccttcatcccctctaacatggccatcatcctcccagtgctatatttatagacttgggcgcctactgagactcttttgtcttccttattcatgagagctcattagtcatgaagttctgtgaatttttgtaatacacttcatggttcttgcaactattgctgtcctctttatacccagtgctactgcttcagatcagggcctcaagtactctcaccttattattgcatcacttcctaactggtcttgctgcttccaaccttatgtctctcgaagccagtctctccatagccattgtgatggctctaggtctaaacatttcacttccctgcaaacgaaatccttcagtggcaccttagttccctatgggaaatgtccaggctcttttatccggcctgaaaggcccaccatgacctccagcttcaccattcacctccctgcccagcccacataagccggccatgccaagccactgcatggacctgactgtttgcacatctgtatctgtaaacacaccttcccctcctcctagaatgtccttcccccccaggttcatctggaaaactcttactcatccttcaaaaccctgctcaggcttcaccctccaggtagagatgctcatgcatgcctctctgctaccatcatgcccacaacatacctctattaaggcctctactgcttcatattgcaatgatttgtgtacagcgcatctcccaggtaaaatgagagctgcttgagggccagacagtggtttatagaaattatttccccaggacctagcacagcttctgacacaccataagcactaaatatactttgttgatatagatgatttttctgaattgatccaactgattcctttcacaagcacaaccactgcagggaagaaaaatagtcttcttacttaggaaaaaaattacttgacatgtcttaactgtaaaacccttgaacaagcactttatccttcttctgtggttactttttcttttttattgtgtcgctgtggtctggataaagttgtctgagttttattcatttcttaactctgattgctatcttgcaagggggatgggatgaaatagcaaacaatatattctagcttttttctttcccagaggcatatatagaacagcctctgaagaagtattaatattggaaaagatgctattatctgcattatactaattaatccatacatctacctgtcattctttcttttctatggcttttctcaccgcagtggtgtgctcttccgctgctggtaaattggcacaataaatctggggggaccacctctatttccagcagttcacttaacattttatcacgtggccgtggactcaggattgaagtcagttaaaaagattaataccatttaataccacccagaaggaagatgccagaagtctgtttaaggtcctgttattcatgtcttcatttcctttgtgcgtgtattgtgataagcatagccatcctttttaggctgctgctaataactacttaaaatgattaaggtaactagttatttcctgtaagaaaattgcgctgctgtcattaacacgaaattaacatggctcccatttcatcttcagcacacagcctgttgccccccgttgccttaaacaaacagaactgtctccagaaggctgtgcgctcctttgtaagaggcaaggaggtaagaaagcgtagttttgcagaggatgctgcccatggaggcagccggaggagggaaaagcatagtcccccaaactgccatgaggtttggaggagtaattagcataattgtcattattctgtatggcctgagcaatgtgaatgggatccgtgccctttaaaattcccagttctcagtcgggcatggtggctcatgcctataatcctagcactttgggaggccaaggcgggtggatcacctgaggtcaggagtttgagaccagcctggccaatatggcaaaaccccatctctactaaaaatacaaaaattagctgggcatggtgctgggtgcctgtagtcccagctactcaggggagaatggcttgaacccaggaggcagaggttgcagtgagctgagattgcgccaccgcactccagcctgggtgacagagtaagactccatctcaaaaaaaaaaaaaaaaaattagccaggtgtggtggcaggcacctgtaatcccagctactcaggagactgaggcaggagaattgcttgaaccctgggggcggaggttgcagtgagcctagattgcgccactgtactccagcctgggcgaaagagcaaggctgcgtctcaaaaaaaaaaacaaaaacaaaaaacacacaacaactcccaattctctcaatcagtagttctcttaggttggtgcaaaagtacttgtggtttttgccattagttttaagttttaagaacaaggaccgcaattacttttgtacccaacgaataagattttctcttacttgacacatgcaagacatttgcatgtgagagacactcccatcggaacactctgcttttgagaaggatctacacatatcttgtagggacatgaagcaccgtgatgcttgtaaggtcctaagtattaatggtaagtcagcaatggctgcttattgggagtcttggcacaaataagattggctagtgctacttaagtggagtctgtgaacatgtgtgtacaagttttagtttgagtacgtgttttcagttattttgggtatatacctatgaccggcattgctggactctgtacttttatgttcaactttttgaggaaccaccaaactgttttcctatattttaaagttgagcacttatgtgtgccaggccccgagttgaagagttcacgagatagtgtacttggagggtgaacatctagagccaggaggagaccagagggccaaagtagttcaagtcatctttgggaatctgtcacagttgtccctcttgctcacttgctcttactcctctaccccactctgattgtctgctgtgagtggcaccatcagcacagccatcacctgagagcatattagacatgcagaatctggggccccacccagacctactgcaccagcatttctgggggtgaggcccaggaatctgtttttaagaagccctctaggtgtttctgatgattactcaagactgagaagctccgagatagatgtaggtgcagtgttacccttgttgctcttacatcagaaaccctattggctgcaaagtgagcgtcagatactgcttttagagatagcttttagtcttctctaacttaaatacagtgaatcatatgcaacactccccacttttagcaggttatgtgcacccacttcacttacaactgcaaaaccctaccattccaggcagagtcacctcggttccatatcatgtcaggggctcttaacttgtcacagtagaaataacccagggttatcttagtaatcctgagactgtgctcttctttaccacccaggccagcctgcaaatgtgatgatgggtctaccacagagtccatggccacagagtagccctctgtggcttcctgacagccaagagcagcctcgatttgatatctggtgtttgttttaagcctttcctttttctgctgtcaggaagtggtaatgtagtagtgtgttgaaagagcatacattttgttgtcaaacagaccagggtttgaattctgattctgctacttgagcctgcaaaatgggttaataatatctactatgtggaataatatttgttcaataaatggtggtgatatggtttgggtctgtgtccccacccaaatctcatgttcaattgtaatactcagcgttggaggtgaggcctggtgggaggttactggatcatgtgggcggagttctcatgaatggtttagcaccatccactgtgggccgttcttgtgatagtgagtgagttatcatgagatgtggttgtttaaaagtgtgtagtacctcctcccttgtgctcttcctcctgctccagccatatgaagaggcacctgctcctgccatcattgtaagtttcctgaggcccccccagaagcagatgctgccatgcttcctgtacagcctgcagaaccatgaaccaatgaaacctcttttcttataatgtacccagtctcaggcatttctttatagcaatgcgagaatgaactaatagaagtggttactgctgttattaatcattgctgataattaaaaaaaaccaaatatgtacataaaaagagggagacagggtggagtagagagagagagagaactgtcataaattcctaaagactttttgaactactgtggccctctgtctcctcttggctctagatgtttgtcatccaagtgaactattttgtgaactcttcaactcagtgcttggtacggggtaagcactcaaaacaatttggtacctcaaaaagttaaacatacaattaccatataacccaacaatgccactcctaggtatacacccccccccccaccggctgccaattgaaaataggtacccaaactgaaaactgtacacccatgttcacagcagcactattcacaataccaaaaggtagaaacaacccaaatgtccatcaatgaatgaatgggcaatttgtggtatacccacaaaatggaatattatcctgccatgaaaaggaagaaatgacaatacatgctacaatgtggatgaaccttggaaacatgctatgtgaaagaaagcagaccaaaaactcacatattgtataataatatgtaaaatctagaacaggtaaatccatagagacaggttgccagaagctggggaagggagaaatgggagtgactttaatagataatggggtttccttttggaatggtgaaagtgttttggaactagataaatgtggttgcataacattttgactgtgctaagtgccattaaattgttcactttaaaatggttacttttatactgttaaaattaattaaaaatatatatgtatatatgtttatagaacaataaaggatgaaaggctgagcctgaataactgatttacttattcggaaaagcaaagccgtttaaaaaatattttacttctgttgcttctggctataactgaaaatccctcagtccatgtggggaacacagatgacgaatacgcagccctccagcatgtgtatgtggtcattaacttggccttgctggtccagggatttcaggtaaaaatcaggaactatgaaagttattaataactcagttgcttctaagacaggtgaacatctaagacagggccataggaatggtgtaatgcagtcaagagaaaaatgtgaaggagaaggatgcaggcaagttctcctgagagacagatccaggagcataaaattggcattttttctccattaaacaatttgggatgatctgaagtctcctccaagtttctgtctctctctttatcttaattagcaaagaaagtcttaggtacagtaagccctctccttccctaatggattagccagcaaataggaaactaagctttgggagagactaataatagaatgaagggaaagaaggacaaggattgactgtagacttaagctttctccgttcattcattccttcatgttccaaagcaattgcatttcttatttgtatgctacagtcattctccaccctcaaagagtttaccatttattggtgggggtgggggacatggacacaaacaagtatacagtaaaccacagcatcatatgtcagactgtactgtgcatatgaatcctttggcaatcttgttaaaatgcagattctgattcattatgtctggggcagattctgattcattatgtctggggcagggtctgagactgtttttctttctctttttttttttttgggatggagtctcgctctgtcacccaggctggagtgcagtggcgtgatctctgctcactgcaagctccgcctcccgggttcacaccattctcctgcctcagcctccctagtagctgggactacaagtgcccaccaccacgcccagctaattccttttttatttttagtagagatggggtttcaccgtgttagccaggatggtcttgatctcctgacctcgtgatctgcccgccttggcctcccaaagtgctgggattacaggcatgagccaccgtgcctggcctattttttttttttttttaagacagagtcttgctttgtcaccaggctggagtgcagtggcgcaatctcagctcactgcaacctccaacccctgggttgaagcgattctcctgcctcagcctcccaaatggagactccgtatttctaagagcacagaggtgaagcctgtgttcctggtctgaggggctagagtgtgataaccacaataaaaaggagatgccgtacagcagattcagcaaacagcctgcaggccatatcctatttttgtatggcccatgaactaaggatggttatacatttttaaatggttgggaaaaaactcaaaccaaaacaattgaagaaggctgtttcacgacaactgaaaattatataaaattcaactttcagcatctgtaaacaatgtttcattggaacagtcacccctatttgtttgcatattgtctgtgactgctttcccactacaaaggcagagttgagtagttgcaactgagaccatatggcccacgaagcctaacatgtttactatctggcccttcactggaaaaaaaaattgtctatccctggtataaagtaatatgggatttcaagagagagggaaagatcatttccagttgtattcatcagggaagacttcatggaggaagagtatatgagtagcttgaccagtgagtaggatctgagtggcagccgttggggaggaaggaaatctagtaaatgcataggcttggaaataaggaaagcaggtggcatgactacagatctcagtgtcgaaagccttaagccaggttgctgtccagactgccagcttccttctgaatgggaaagagaaatgctctgacacaaagaaactctggttcccagctctggaagattaaaccaattgggcaagtgtatggtggactacatgtgtatccgtgagcaataatgaaggccaggtataacagtggatttctgggtgagcatttggaagccagtggttctcaaagttggggagtgacactcccgcaccctgttccccagggagtgtttggaaacatctcttttgggttgtcatactaattaggggacatctcctgatacttactccccaggagtcaagaatgctaaaggatttacagtgggatgcagaagactatagttctgggcaaggtcacatgtcctcccctgaatgtcaacagcaccctcaataacatgctcagtctgaggactcttctgtggtgtagaatgaccataggttgagaaattaaaagacttggatgaagggaatggaacccacttggatagtgatgaatggagaccaagcaagagggcagattgatgctattgcttggcagtgagaccaaaagacttccatttcccccccaacattcccagagagccagaatgccagggtagagtacaaatccaaagagaatctatattgtagggaatatttatggtgcctatgaaagataagatttgcatgatgggtgaaggtcaatgacaattatttattcacaaccagtcttccagccttaatctgcacagtggttaggtggctagctttgcaatcagaaagagctgggtatgatttcagctttgtctcttcctagctgggaaacctggataagttattttaaattttcttgttttctgatctgcaaaatgggtatggtaatagattgttttaagtattgattgagataatccgtggggcaggcttagcacaatattggggccctcaggggtgccctgtaaatgagtttccatctctctttgcttcaatgaacacgaactgattttctgatgccatcagtgctgctgttggcatcagaatagcaggtgggaaaattagaggggaaccaattttagccatgcatagcattggttgatataagggatggcttctcaatcttggcactgttcatatattgggctggatagttctttgttgtgggggctaccttgtacattgtaggatgtctagtagtatccctggcctctacccactagagacgccagtagcacccccagtcatgacaaccctaactgtctctagacattgccaaatgtcccctgaaaggcaatatggtcctcgatcgagaccactggtttaaggtaagagaaaaataagtcgtggctgtttatctttttatacaaatgtaaggggtacaattgcagttttgtcacatggctatattgtgtagtagtaaaatatgggcttttagtgtaaccatcacccaaataacatacattgtagccatcaggtaatttctcatccctccccctgccacccttctgcgtctccagtgtctataagtccatactctaggtccatgggtacatattattaagcttcacttagacgtgggaacatggggtatttgattttctgatctgtggctgtttggggtgaagggagaaatgcaggattgctttgatttttgtcttagcaaaaaatctgaccataaatctccaagctctatggtctgtaaattcaacaacataccatgttttcccctaatgccaggcactgcattcgatcctggggacagatagaaataagacatggtccctgttctctaggtagggaccacctttttttgcagagccccagctgaggaagaagactcttgaaaactctggccatgaagtggccatttgttttccgggcagagtctgccatcgggtttctaaaaaacgtggttgggcagccacactgataagatgggaggccaggtggatttatgtgggtgtttattctgagagttgggccaaggcacaagctgaaaccgctggcaaaatgaaacttcccctggccactgtgaggaggctgaatttatctcaggggatgtggtttggttgacaagactgattatatggggtttattgtttacatgagtataatatactcagggctcaaggcagaaggtgggttttataaatcagcaggtaagtaaaataaatgcgttgggctagatactcctgctccctggataaaggtgaaaggggatggtgaattacagttaacacagaaaatgaagagaattcaaaaaacccagcggattccttcttaagcgaccatttactgccaccacccaaaggcttcatcccatttaccccacctacccatggccatatattctatgagaacattctgaaattttgtatatacattggaaacagaagcttgtctccttaccattaataaccaaatgtaaggaaatggaaagacggaacacgccctgataaacgtggggcaaagaagggaaacctgacgttgatgaagggctcctctgtagcaggcacagtggcgggtgcttgatacatacatcattccatttaattcacacaaaaatcctgtgggtggttatttcccaaatttgcctgcttataagaaccaccaggcatgcttattataaatccagaggtctttgtccctcccttggacctactgaatcctactgtctggggaaacatgaaaatctgtatttttaaccatcacttcaggggtttctaatgatcggctagattggaaaacacttcattaaactgtaattcatcatccccaagttatatggatgtggaaagtagctttgcctgacccttaattctaaacccttttcatggcttcatggtgcctccttagaaatgacaggtccaattaagacacagacaagatgggtttaaaatttgcctctgctttgcatatcagttccttagagctttgagagtcagtgtggtggagaggacatgaccgctgtaactggagtccaaggactgagttacagctctgtaatttattagctctgtgaccttagacaagttagtaaagctctcctggtcacagttttttcttctgtaaaatggtgattaaaaaaatctcacttgctccgactgcttccagatccattgtgtggaccaaatgagataatcgacgggaaaacgttttgcaaatggtaaagccgcctgtgaggtcttaatattatccattcctgatggagttgataccccaattatctgtgtaaccagtttcttttttgtgcaatacgtaaagctttgaacttttcttctcacttttgggtgacttcagacagcgtggatgatgtgaaaataaggaattcgcgtttattgacagatgaaataaaggatgaaaggtgctctctggcaaaggctgctactaaatgcaagaaaccccgggacaagccacccactgaaggcatgtgcacatgtgttctctgaaactcatgatatgtggcagccagtgctccactggattaacatggataaatgaatattaataggaccaccactctaggaaggataattgggggttgcctagatcactctctagtgactgagactgtcagagaaccttcagactcctaagcctggtcccaccctgcggcaggctgaataaataggtctttaaagatgttcatgttctaatccccagaacctgtgaaaatgttgccttacatggaaaaataactttgcagatgtgattaagttaagggtcttgagaagaagggggagattatcctggattatctaagtgagcacaacataatcacaaggatccttccaagtgaatagtggagcagggagagcacagaagatgtaatgtgggaccagagattggagtgtgatgagtgtgagaaggcgtcaactggccattgctggctttgaagatggattctgccctacagcctccagaaagaatgaagccctaccaacacgttgatcttagctcagtgaaacccactttgggcttctgacctccagaactataagataataaatgtgtgtggttttgagccactacgtttgtggtagtgttagagtagccataggaaaccagtgcacccccaccgttcccagtgtttatcagtggggtgctattgtcatgtgagtggaggctggtttctagcatagcagggcacctagcatctgattaagtactaagtgccagcctcccaaatcatttaactacccaaaacgtgccatgccctggttgaaaggcatagcttacatcgctgacacatctggggactaaaagaacatgtgggaatgggcttcagaggagcagaattttaaaaatacatttaaagcttaatggttctctttagtattaatttgctcactatgagattggaaacttctttatgcctacatgacctctgtacatccggatccaccacctggcccagagttggtgctctcaaagtgattgtgaagaaaataaatggattctttgattatatctcactcctccaaagagaatttataatgccttaaaatattaaaaagtgtaagctgaaaataatgaaatcaaatgccattaaaagaagcagagaaagagatacctagatgcctggggtgggtggtttgtttcttagctccacatttggccttgaattcctgactgcaaaaattagacaggcattacccacttgaacaccttcttaggtctcacatgtgggtcaaaggcaaattgtaggatgttaggagggacatatggtttaccagatatagccatctgaggactctcatgctaaaaatacaaatatatgtttgatctccagaaatatcccttacaattaggctagggatggttgaaaaatacacccagcttgattagagatagccagaggcatgctgctgtgaacggtttattattgagatttttggaggctatgaatgatggggaagatggcatgaagacccagatttgccgtctgtaaatcatttgagactctctctgtgtcatcatcaggactggaagggaagtcccataggctgggagtgggagatgggagggctagagtgtctttgtgtcctctggtaaagaaaacaaacccatctccagccccttgtgtctcctcctacctctgcaaagctgccaggtacaactgctctgtgttattgatgctaatgacccacgtaatggccctgcaagaaggatttcaaatctgcaaatgatggcttttgcaggcaccacaaatcactgagccttgcaatcaaatgcagagggacccagatcactgaaggacttgggataatgaatgataaaatgcagtttaatgtggacaaatgtaaaataatatgtcttggaacaaacaatcagaaggaggaacagctgctaaatgaattggtttgcattacactgaccagggaatagaaatgggcctgagtggcagccaaacaatcaacagaggtgaaggttgaagaggctggtccctgttgtaggaaaataaccccagaaaagtcagagggaggaaaatgatcaagttaattcctgcctcacaggcacctgatacgccacaaagaggaatacaaatggcctgacacccattctgagctcaatgctggctgttgctgcttaagctccttgccagctcctctgctcaacctccaaacctggggtgccccagggattggggggctaacacggtttggctgtgtccccacccaaatctcaccttgaattgtaataatccccatgggtcaagggcagggccaggtggagataattgaatcatgggtcggggggggcgtctgtttcccccatactgttcttgtggtagtgaataagtctcatgagatctgatggttttataaatgggagtaaccctgcacaagctctcttgcttgtcaccgtgtaagacgtgactttgctcctcattcacctgccatgattgtgaggccttcccagctatgtggacctgtgagtcaattaaacctctttcctttataaattacccagttacaggtacatctttattagcagcataagaacagactaatacaggtgccctaggacttgggccttggctttctcttcttcagcctcactatctcaccaaagtatctcaatcagtcctgtggcttttaagaatcatctataccctgaagatactcaaagttacaccttcaattgacctctccctagcttagatctcttagtcagtggtctcaaagttttctatgtattagaatcaccttgaggatattaaaaaaaatcttaatgtctacaccctagatgaatgaagtcaagatctctaggagtgggcccaggcattagttttaactctacaggtaattccaagatgcagttaagtttgagattaagttgcccacttaatctctccacttggatgtatacttagtgtctcaaatgtaatatgaccaaataaacttcattattatccctatttcacacttgatcatctcacacttgatcagtggatggcttccccatccactgatctctcaagccccaaaagtaagcttgatactagttgtttattttctctcactacctacagctactccaccagcaaagtcttcagttccaacttgaaaacatccaacgtcattctaccatcaagtccaacctgtaccactgcaagttttaattaatctgcttacttttggctcttctctactcacttctccctcttgtatccaaagtaatcttaaaaccaggtcatgtcacacccctatttaaaaacctccagtggcttctatcccatgtcgtataaaatccaagctcattgtcctgacttttgaaaccctcaatgactttctacatcttacctttatgatctcattttgtatcattcatcccttatccaccaggctcattcccatgtttgaaattttgcaccatttcatttgtgtaaaatatacttcctttgatcttcacagggctcactgggtcttgtcatttagatgacaccataaaaatgtctccttcttagatcattcttagtcattcaatatcaattagtcatttatcaccatgtagtattttcttgtttgttacctacaagccctcaccagaatgtaaattccacgaaacagggacctagtctattttgttcactgctaaattctcaatgcctaatatagagcctggcacatactaggtgctcaataaatatatgttgaatgaatgaatgaatgaatgaattctatcaatgaaagaaagcaaggcccagagaaactagcttaagattttatagcttatagtggccatgctctatggtttgtaccagtggtttccgggtcaagtttttgtcaatccatagtgaaatgagaacaaagacatcactgtggttctatcaaatagaaacaacttgcttatattttgagattatttacttattgcttttttgatattaaaatgtccttgctcttataaaatgctattgataatatatgacaagttatttgggagtttattttaacttcctcaacaaaataaaaactgtgataacccaataaagtttctagttttctaaaaaagttataattgtggtatccagccttcaagaatactccttaatgattcttgccacctgatattcatgctcctgtgtggttccctctcatgttgcgtagagttgaactgtgaaaccaacaggatattaagtaaatgacagtgtgcgacttccagggccacatcataaaacaccacagcttccttcttatgctcccttggatcacctgctttggggggagatggctgcaatgtcatgtgaacactcaagcagccctatgggaaatgtgtgtggtgaggaactgaggcctccagccatcagccagcactgattcaccacccatatgagtaagccaccttggaagtgaatcttctaccccagtcaagccttcagatgacttctgccttgggtgacatcagactacaacctctcggaagacccctagccagaactacccagctaagccactcccagattcctgaaacagtgaggtaatgttttttaagtcattacattttgggataatgaattatgcagcaatggataactaatacattgattaataacattccaaaaatctggagacctgcattgctgtaatcttttttgaattacggtttgcacgactggctagtttaaccactaaacatctctaagctttagctttcttgtctataacatagaaatagtattcatccctacttcttaggttgctgtgaggattaagtgagatgatgtctgtgtttggaactaatattattgaatgttatttttatcattattcttgttttatattattatggactatttcatgcctaaatgatttgcagtaccatcttctatgcctgaattgtatccctttccccatctgcctgcagaattacactttattccagacctagtacaagtatttatactctttgatgcccttcttgaccttagaagagctgatcctttcctctttgtccctgtattcttttctctattatagcacttatcatgtgtattacaattagttactgacatgtccatctcttctaccatatacaatcctaccaagcacttatttggctgttattacaggccaggtgttgtcctaacacttgtatatattgactcatgtaattgttacaataaccctaagaggcaagttctatttttatctctattttatataaggggtaacggaggcacagatttaagcacgcagtagagccaagattaaaacctgggcgtttcagctcccaatgtggtgctctcaaccatatcatccctcagagaaagggagcaccctatggacagagaccttggctcacttatgttggcctccctagtacccactagagtttttggaatatgggaagcttgtaataaaaataacagcaattattatctgctatataaaatactatgctgagaactttacaaagcagagattttaaaaatggccatttacaaatgagaatcctaaggcttagcgaggctaaataacttcatgtaaagctcctagaggtggcatagcagtcaggattccagcccagggccatttgattccaagggccattcttttttcatggcatcaaacacgcccaatgattttgaatgaatgaatgattacatgaatatgtgatggaatatcatttgtcataaattggcaaaggagaaagtgaatgatccgtgtgtacttatttctactttgagataaatataatttgaaataataatggggttattgagatataaggaaatgatgccacagaaggaagaacattgattttgtgctggacagctttctattttatgtggcctgctgattgccagtgacaatttccagtatagagactgacatcctttacaatttgagctgtccccagcctccatgtgccctgtggtgcaggcaacatgccttttctttctcttttttccctccctttcttccttcctttagcattttaaaatttatttatatttttaactgacaaatgaaaattcaatatgtttattgtgtgcaatgtgataatgttttgaaatatgtatacattgtggattgactaaatctggctaattaacatatgcattactttgtatacttgtttgtggtgagaacacttaaaatctactcttaccgatttttttttttttgagatggagtctcactctttcagccaggctggagtgcagtggcatgatcttggctcactgcaaccaccacctcccaggttcaagtgattctcctgcctcagtctcccaagtagctgggattacaggaacacaccaacacacccagctaatttttgtatttttagtagacatggggttttaccatgttggccaggctgatcttgaactcctgacctcaggtgatccgcctgccttggcctcccaaagtgctgggattacaggcgtgagccaccatgcctcggcccctctcttagcaatttttaataccacaatacattgctattaactatagtcatcatgtacagtagggctattgaaattattctaactacaattttgtatattttgactgacatctctctaatcccccaaccttcctccagcctctggtagccaacattcttctcttcacttctatgagtttaactttttaagattccatgtgtgatatggtttggctatgtccccacccaaatctcatcttgaattatcgctcccctattccccatgtgtcatgggagaggcctggtgggaggtaatcgaatcatggggatgggtattcccatgctgttcttgtgatagtgaataagtctcatgagatctgatggttttacaaagggcagttcccctgcacatgctctcttgcctgctgccatgtaagacatgcctttgcttctctttcaccttctaccatgattgtgaggccttcccagccatatggaactgtgagtctattaaacctctttttctttataaattacccagtcttgggtatttcttcatagcagtatgaaaatggactaatacaacatgtaagtgagatcttgtggtatttgtgcctggcttatttcacttagcatgtcttccagattcatctaggttgtctcaaatgacagaatttccttcctttttttttaaggctgagtagtattccattgtgtatatccactacattttctttaccattgctccactgatggacacttaggttaatttcatatcttagctattagaaataatgctgcaacaaatatgggatgcagatatcatttcaatatactgattccatatcctttgggcatatatacagtacagggattcctggatcatatggtggttttacttttttgaagaatcttcatactgtttccgtaatggctgtgctaatttgcattcccatcaacagtgtttcagggttcccttttcttcacatcctttgcacatattctccaacacttgttatgtttcatctttttgataatagatattctaagttgtgaggtaatatctcactgtgattttcatttgcatttgatgattagggatgttgaacattttttcatatacctattggtcatcggtatgtcattttgagaactgtctgttccaatcctttgcccatttttaaatcaggtgtttttactactattgagttgcttgagctcctatacattttggatatcaacttcttatcaggtgtatgctttacaaatattaatactttccttctgtaggttgtctctacactctgttgataatttccttggctgcataaaaggttttcagtttgatgtagtcccatttgcttttgttgcttgtgcttttgtgttcatatataaaaaaaatcattgcctaaactaatgtcatagaccaatgttgccttatgttttcttctagtagtttcatagtttcaggtcttacatttaagtctttaatccacttttagttggctattgtggtgcatggtgtgagttaagggtctaatttcattcttttacatgtgactatccagttttcccaacaccatttattgaagagactgtcctttccccagtgtgtgttcttgacacctttgtcacccttgctatcatattggcctgagtcactttcagatgttgctgagaaaaaaatcccaacccatgggatacttaaaacatggctcttaaaacttgatctaaaagtgctttagctaattgagatgtattgtgattccatatgaattttaggaattttttctatttctatgaacaatgtcattggtattttgatagggattgcttgaatcagtagaccattctgggtagttcagatgtttaacaatattaattcttccagctcatgagcatgggatatctcactacagttttttgttcctcttcaatttcttttcttagtgttttataggtttccttgtagatagcttttacttctttggttaatttattcttagggttttttttttttttttggtagctattgtaaatgggattgatttcttgattcctttttcagattgatcactgttaacatatagtaatgctacagtttgttttctatctacctacctatctacctatccatcctatctatctatctatctatctatctatctatctatctatctatctatctatctatctattttaccatttaccatgggaatgataggtttttttaaaacctaagattatctcatttgcagacaaggataatttgatttcttcctttccaacttggataatcattttctttctttctcttgcttaattgctcatgaccactccagtactatgttgcataaatgcagtgaaagtgaacatccttgtcttgttccagctctcatttctgtttatcaatgaatagtatttcattgtgtagatgcaccatggttaatccattaattattggcctattgaagggcatgttggtgtttctaagttttcacaattatgaataaagctcctataaatatttgtatgcaggttttcatgtggaaataagttttttattaatttaaatgaacaccaaggagtgttattatgaattgaccagtttcaactggccgtgactggctttgactggttttgagcagccatcactggttttggctgtccacgaccagcttcaacttgtttccactggttttgaatggtcttggctggtgttggccggtttcaacaggtcttagtcagttggtttcagccagtttcagccagtttcatttggttttgactggtttcaactagcttctgcgaatttccatgggttataacagatttttactagttatagccaatttggactagtttcagccaatttggactagtttcagcagggctcaactggttccagctggttttgactggttttagccagcttcagccaatgttgactggtttcattcagctttgaccagtttcagttggcttcagccatctgttttgactagtttcagctggcttcaactggtttaaagcagtggtagccagttttagctggttttggctggtttagaacagtttagactcctctgggtaattatatctttttctctttaaaaaaaaataattttaacatttttgacttggggttatatgtgcaggttacctgggtatattgcatgatgctgagtttggggtatgattgttcccatcaccaaggtactgagcatagcacccaatagtttttcagcttttcaccccctatccacccccgaccatctagcagtccccagtgtttgtgtttgtcatctttatgtccatgagtacccaatgtttacctcctatttataagtgagaacatgcagtatttggttttctgtttctacattaatttgcttaggataatggcctccagctgcatccatattcctgcaaaaatcatgatttcattctttttttatttctgtgtagcatttcatggtgtatatgtaccatattttctttatttgattcactgctaatggggggcccctaggttgatccacgtctttgttattgtaaatactaatgtgatgaatagaggagtgcatgtgtctttttggtagaacaatttattttcttttggatatataccccataatgggattgtgaggttgaatggtagttctgttctaagttctttaagaaattcacccccggctggacacagtggctcacacctgtaattccagcactttgggagactaaggtgagtggatcacctgaggttgagagttcgagaccagcctgaccaacatggagaaatcctgtctctactgaaaatacaaaattagctaggcgtggtggtgcatgcctgcaatcctggctacttgggaggctgaggcaggagaatcgcttgaacccgggaggcagaggttgcagtgagctgagatcatgccattgcactccagcctgggcaacaagagcgaaactccgtctcggaaaaaaaaaaaaaagaaatctccaaattgctttccaagtggcagaactaatttacattcccaccaataatgtataagtgtttcctttttctccacagcttgccagtatctgttgttttttgactttttaataatagccattctgacttgtgtgagatggtatctctttgtggttttgatttgcattcctctgatgattagtgatgtggaacattttgttgttgttgttcacttgtatattttcttttgagaagtggctgttcatgtcttttgcacactttttaatggggtttttttttttttttgcttcttcggttgttaaaatttcttgtaggttctggatatcagagctttgttggatgcatagtttgtgaatattttctctaattctgtgggtggtctgtttactctgttgatagcttcttttgctgtgtagaagatctttagtttaattcggtcccacttgtcaatttttgtttttgttgcaattgcttttgaggacttattcataaactatatcccaaggctaacatccagaatggtgtttcctaggttttcttctgggattcttgcagtttgaggtcttacatttacatcattaatatatcttgagtgagttgacttttgtataggtgaaaggtaggggtccagtttcattcttccgcatatggctagctggcttttccagcaccatttattgaataggaagtccttttctcattgcttatttattcccactttgttgcatatcagttagccatgggtgtatggcttatttctaagttctctattctgtcccattgttctatgtgtctgtttttgtaccagtaccatactgttttggttactgtggccttatagcatagtttgaagttgggtaatatgattcctccagctttgttctttttgcttaggattgctttggctactcatgttcttttttggttccatatgaattttagaatagttttttctatttttgtgaaaaatgatggtagcttgataagaatagcattgaatctacagattgctttgggcagtatggccattttaacaatattgattcttccaatccatgagcatggaatatttttccatttgtttcctgtatgatttctttcacagtttttgttttgttttgtttttgtttttgtaattctccttgtagagatctttctcctctttggttagatgtattactatatatgtgggtgtttgtgtgtggctattgtaagagggattgtgttcttgatttgactctcagcttgaatgttatcggtgtatagaaatgctatatttttgtacattgattttgtatcctgaaacctcactgaagtcatttatcagtgccaggagctttttgacagagtccttagggttttctaggtatcatatcatcagcaaagagagatagtttgactccttcttttcctatttggatgccttttatttctttttcttgccagattgctctggcaaggacttccagtactgtgttgaatagaagtagtgagaatgagcatccttcactttttccagttgtcaaagggaatgcttccagcttttgcctattcagtataatgttggctgtggttttgtcatagatggctcctattattttgaggtatgtttctttgatgtcttgtttcttgagggtttttatcacttagggatgttggattttattaaaatctttttctatatctattgagatgatcatatggtttttgtttttaattctgtttatgtggtgaatcacatctattgattcatatatattgaaccaaccttgcatcccaggaaggaagcctatttgatcatggtgaattaactttttaatgtgctgctggatttggtttgctagtatttcgttgcagatttttacatctatgttcatcagggatattgacctttagttttcttttttgttgttgtatctttgccagggtttggtgtcagggtgatgctggctttgtagaaagagttagggaggagtcccgcctccttgattttttggaatagtttcaatagagttggtaccagctatcctttgtttatatggtagaatttggctgtgaatccacctgatttggcctttttttggttataggttttaaattactgattcaattttggaacttaatattggtctgttcagggtttccgtttaatcttgggaggttgcgtgttttcagaaatttatgtatttctgtgggattgttgtaatgttaccttcgcagtttctgattgtgcttacttggatcttctctcttttcctttggtaatctagctagtggtctattgatttttatcttttcaaaaagccaccttctagattttttgattctttgtatggatttttgggttgccaatttcattcagttctgctcaattttagttatttcttctcttttgctagctttgaggttagttcgttcttgtttttctagttcctctaggtgtgatgttagattgttaatctgagatctttctatgtttttgaggctggtgtttagcactataaactgtccccttaacataacttttgctgtatcccacagattttggcatgttctgtctctgtgtttatttatttcaatgaattgttggacctcttggatagaaccacaaaagcataggcagcaaaaaacaaacatatagttgcatcaaactaaaacgagtttgatgcaactgtattcttctgcacagcaaagaaaacaatagagtgaagagacatcccatagattgatatgtatatacatctgtgtctatgtgttttggctttgggaaatcagtaaaccacaggactttgattttaatttatgtacacaggtaggtatctcccaggggcctcttaagaggtaataatgcaacgtaatgaaaaaaaaaaaaagcaccgtgttagagctgaactgtactagtaccatcacctatgtactatctccatgtgggcaaattacttaaactctctgtacctttgccttcctatcagtaaaatgggaacagtaacatgtattttagcttcatggtgaggattaaacataaagctctacctgacttgggcttcccattcatctctgagcttatagcctaagatactccccctacagcacatttctttccagctaccttagtttcttagtcattcctcaaattcactgggcaagtgcctgcctcagggcctttgtaccagctcttccctttgctcaaacattttcttctcagatccccaaatggctcaccacatcaagtcttggctctcatgtcccctcctccatgaggcttgtcctgactcttctgattagttctgtatcctcctcctgccactctcaagaccctttgctttgctttctcttctttccatagcagttaacatctccttgtagatgagacgttgtatttattaattagtatctatctccaactgctagaatgtaagccatatgagggccagggtcttcgtgttttacactggtttatccccagcaactagaacacagcctggcacatagaaggcaccccataaatattcactgaatgaataaacaaatgaatgcatgaatgaaatcactcagtacagtgcctggcatattgtacacatctaaggaatgtagctattattgttgttacctggatttccccaggatacttcatcctggaactgtgaataattttaatgcccaatttcactacttgccaaacctgcacatctgcaggtgtcaccctcctttttgactactaccctgatgtctcctccagtcatttataattggggcccaggtggccatctgattttgttctttagctctggacttgtggtggcatcatgtacttgaagtcctatgggggtggcccctctctgtccagcagctgctgccctctgtgggatgctgctttcctgcctccctgctgggtcctgctgcttcctcatcaccttgccagacacagcagatgctgctgctgctactgttgctgcttcccatcctttctgattgctgtcgctatgttctccctagaaactcagaaaatgctctgctccctcaccttccgtctggctggctcatctggaccctgaagtgaagcagcgtgtgctccaagcctttcaaggtcactggacgaaacaagtcttcttcagttttcacttaggaccagtatctgacaaagagatgccatcgtgcccttaatgttcttgtctcccttctgtttttcttcctgctttactgaggtataattgatagaaggcaattgtatatatttaaggtatacagaatgactttttaatatttgtagacattgtgaaataatcagtcaaattaattaacatatccatcacctcacatagttaccttttctcttttttctttgataggaacacttaagatctaccctcatacaaatttcaaatacacaatacggtattgttaactgttgtcacttatagtgcattaaatctccagaatttattaattttgtatactgatactgtaccctttgcccagatctcctcatttgcctctccttccaacccctggtaaccaccacctactctctgcttctgtgagcttgactattttagattccatatataagacatcacatagtatttgcttttctgtgcctggcttatatcacttagcctaatgtcttccaggttcatccatgttgcaaatggcaggatttcctttgtttttaaggctggatgatattccattttcattacccattcatctgttcatgaacattatgttgtttctatatattggttattatgaataaggctgcagtgaacacgagagtgccaatatctgttcaggataaaaattttatttcctgggccgagtgtggtgactcacgcctgtaatcccagcactttgggaggccaaggtgggtggatcacctgaggtcaggtgtttgagaccagcctgggcaacatggtgaaaccccgtctctactaaaaatacaaaaaaattacccaggtatggtggcgggcacttgtaatcccagctacttgggaggctgaggcaggagaatcgcttgaacccaggaggtggaccttgcagtgagccgagatcatgccattgcatgccagcctgggtgacaagagcgaaactccatctcaaaaaaaaaaaaaaaattatttcctttgggtatatacccagaagtggggttgctggatagtaaggtggtttgaggagtctccatagtgctttctagctttctttgaactaacctcctccccttcttgcaaccggagacacacacagcccccaggcctactaattcctgcaaatgcttgtctgccagcaggtggctactggtccctcatgttcagtttttgcttagcttcagcgaagacatccctcgagagcataagaaaaaacagtcatcatttttaaaaatacagaaaaaatctattgctttattgcatgttggtagactgctgttccctttgacagtccagttctgcatgacaagtctacttgcatgtcccgacagatggcccatggtaacggggcattgctgatcttgttacaatgaaatctattcaatgaaaaattctccccagcagatgtgtataccagcttcatccccatgtgggtatcaatctctttatgagacattgttttggtggtatttataagcagacagttgtaggataaagagagagaggtgactgctattagtattaattatgatctcttgcatttagtgcttcatgctttttcaaaaatgtttccacagctgttcctttatttgattcttgcaacatccccatggggtagacatcagagatgaagggagaaggcatgcaaagtactttccttccttcctttcaagatgttagaataagtttgcaccatggttgtggccatcaggtggtaggctgcacgatgctgcagagagaactagactgggaatcccagctctgcctttgaaataggagagcatccttggagaactggtgaatgtcccggtcagtgaagtagtcttagccgggttgctgcagtggccgcctaacaggtctcactgctgtctttgtcttgcttccatctgtcctcagtgcagcagccagaggggatgttttaagtcatacttcagataatatcgctgcactgctcacagaccctcccaaagctctccaccccactcagagcaagagcagaatcctggcaatggctgacaagacccctgggttttgtccgacatcttctctggccccttctcccacctccgtttgctcatgctctggccacattggcctccttggtgctccttgaacatggcacagttccatgggcctccacggcacctgcttcctctgctgccacattgttccccacctgtgcttggctcaccccctcatggccttccatctgctcgtctcaccttcacgtctccgtgaagcctgtcccaatgactgtatgcttcccttgcctgcctaacctctccttcctaatccttctcacctgttctctggattgcttttcacgacagcacttaccgtcgcctaacattccgtaagtggtcacgttcctgggctgtcggaacaccacaaactgagggacatagatggagctggaagccattatccttagcaaactaacacaggaacagaaaaccaaacactgtatgttctcactcataagtgggagctgaacaatgagaacacatggacacagggagggaaaccacacaccccggggcctatgggggtaggagtggagggagcagggagggagagcatcaggattaatagctaatacatgtggggcttaatacctaggtgatggatggataggtgcagcaaatcaccatggcacacgtatacctatgaaacaaccctgtatgccctgcacatgtatcccagaacttaaaatttaaaaaaacaatttttttttcaaaagtctgatatcaaggtgctggcagggttggttccttctggaggctgggaaggggatctgtgctatgctctctcccaggttcttgtggttgctggcaatccttggtgttcctcggcgggcggcaccatcactccggcctctgcctctgttttcacatggttgtcttctgtctgtgtcccaatttccctcttctcataaggacaccagttgttggatcagggcccaccttaattcagtatgacttagtcttaacttgattaagtacatctgcaaagaccctggctccaaataaggtcacgttcagaggttctgggggttaggactgcaacatagctttttggagactcagttcaacccataacactctcatttatttatttattttttttatgtttcttgtttgtttacctctgctcaataaattctgcgaagattggggcctttaatatatgagctggtaggatcccatgatactcacaaatgtcagcttccttccctcaagttcttaatccttttaaatattatttatatccccaaatgaaagtctcataatagttaactctcaattattcacccatgtttggtaacaggccaagaaaacaatttcacagtcatttgtaatgtattgccagaaaaatcctattttgacaaattagacattctatcaaactttctagcttgcattcacattccatttacctagaggctgccacagttctacaaaaggttttacgactagagacagagttctgagacacattgtctccactcagaacctctttctgtggaccttgtagtcaccatgtgtacctccggccaccccatcctgccctgggtcttgtcctcaggttggcaccttacccagatgtcacaaatgcttctcagaacctgccaaccagactacagaatcagacccctaccatgtgagagtcagaagggatcctaaaaatcattcatttgttcactttacaatatatttcttgagtcagaagggatcctaaaaatcattcatttgttcactttacaatatatttcttgagcacctattatgtgccaggcattgtgagtttcctattctattccctttgaacctcacagcactgtgcaagatagatattatggtctctgcattccagatgagagcacagaggcccagagcagttgggagacttgctgtgactactcagctagctggcggtagacccagattcagatccagcattgcctggatctggagccctttatatgaccttgccttgaactactgggcctctgcttttcaatcactctcatccttggtggcacacaagatagccaatagaaggctggtgacaggtcattcttattctcaggcttgtagaaaattttgtatactagttgacattttctcttttacagagaatctttacctttataaatcactttcatgaaggcagaggaggtgctgtgtgatggtggcttccacctggaccccagactccctctccgcctttctctgcctggggagacccactgtgtgcatggcactcactgactcccatacctctggctatcaaaggtttctgccatggccaccctggaaggaaaccagagggaggtagacagggagatcaggtcccttctactctggttcctgctctgtgaaattgtctcaggctggctgtgtccagagggtccctggttctctcagggatgccaaatctacaagaatctctcctcttccagttcctataacctctccttccttttgtctctttagaccttggagtagtagcagccaggttctttctatctctgggttagtgcattatctctggtggctcccttacccaggactttgggaatggtctttttgtaatacattctcctcaaataattcaattttgagtgttctgtatgtatcctgctgggaggttgttatatacaaatcactgtgcccgtttagcagagaaggagactgaagctcagggaggttaagtgtctttctctaggtcgtattgtggagaaagtggctgactggggacttgaatgaggtccctagtttcatgctcggagggcaaagaggaatgtccaattggcctgagataagcctctggtaaaatgtactgtacataataggtaatcaataaatgttggctgatgacaaacatgttttctttgttcattagttatagtgattatgttctaaataactccaacaaggaagtcagcacatttggaatatcattatctttccatgataatatctttccatggaaagataatgatattccaaactgggagtgtccctagcagatctgagtctgtgtattggccctggggtgggccagccccttagactctatggtctcattctctttgtttacaaaattgagataaggccttattctctccccaccccacccatccatattgttttgagaataaaatgagaggatgtgtgtcaagggtgtattttggcaatagtctctgagccattttctgagcacctccatactgttgacactcaagtaatatttcatcagcattccattcagggtcctcccttaatgaggtgtgcgatgtacaagagtcgtgaggtggcaaaggatgggctcctgaggaaacacttaggaaactgggctttctgccattaaaagagacaaacctttgtggtgacctaattaaagtttttaaaattcaatttggaaagttagcaagctaggctcctttccaggaaaaataaggagtcagtgcatgacctaaccggtcccgggctgcttgccattccaaacaactgcagtaagtttatcaccttctttcagggactgaggtttccaggcacagacttggataagaaggatgtcctatggggtcacattgatgctgtggcccaagagaggttgccatgactcgagaaaggttatgaagtatggttttcactaaaggaaaactgatctctttcgattgtttctatggaagcttgtggattataaaacagtatcctttcaaatccatccatccatgtactaacccatctatccgtccatccattcatccatccatcaatgcatgcatgcatctatcattcattcattcatccatccatctatccacctattcttccggccatttatttatccatccaacatatactgagttgctactcccaccaaacactggagattctatactaaatatgacataaccaatactttgaaagagcccaggcttcatgtaaaagcacacaattgaaacaatggttacaagcacaaggcgttaagtcaaaagaccttggtttgagagttgactttgtaatttaagtggccctgtggtcttgggcaagtgtttctctctaggccacatttttcatccgtaaaataatgtagctgaactcaaggaatgctctctaagatctcttcatggtcagatatgctaagattctctgtccaggcaaattcagggcaagatgagatcatcatgtgagtgcagacagtgcaataatctagtcagtggtctcctctgtccaccttgcccatccactctatcttctacagtgtaggcagagtcatcttttcaaaagaaaatctatcacagctgggtgtgatggctcacgcctgtaatcccagcactttgggaggcgacagtggtggatcacctaaggtcaggagttcaagaccagcctggccaacatggcaaaaccccatctctgctaaaaatacaaaaattagccgggtgtgatggcatgcacctgtaatcccagctatcagggaggctgaggcaggagaatcgcttgaagctgggaggtggaggtggaggttgcagtgagccaggatcacgccattccactccagcctgggtgacagagcgactctgtctaaaaaaaaaaaaaagaaaaagaaaaaagaaaagaaaatctatcacatcttttttttcattcatccctgcagtggtggattctattcctcttcggctaaagatcaacattcttaaggaaggtcttcgcagctcttcccagttctccagctcattttgtattaagccttgacttgctatctttgctccttaaacttgctatgttccctcttattacaaggcttccgtgtggcccacttgtacctttccccatcttctatcctgggagaactgctcatccttcagatagcagcctactcaccatttcttcagggacactttctctcacctcccaggtgaggcctggcttctatatatacacatagatcaatgtttcttccttttagagcacaaaccccaaccctgaaccatagcagaggggatccttagtttaacatctggctgccccaccagcttaccaccctcttgggagaaggaactgggtctagtttgctcactactgcactccctaaaacagtgcttggcacatacagggcccccagcaagcattcgtctgaacaaacatggagaatatggtgagtgccctaggctgacaaatataaattcctcatacccggagatgaggacaggaaatagcatccttattggggtaattcacttgaaaaaaaaaatgcctcaaaagaaatccacccatatgttgtaaactcactgctcataagagcaaggtgctctctaaaccccatcaggtagcccacagtgtctctcaaaccttaagggggaggacccttttgaaccaaaatggatgcaacaatagctgtgaagccactgctgagctgctgacggagggtagaggtgacaggtagagatggaaaaaacaaaaggccagagagacagaatttgaccaggggtctctgccactgtgcaaggtaggggtagtttttttcagtctagaatattggttaagtagttgaaaaagccctagaggaaaaagaacaatccataattgttcctgagtgtggttaaaaagcattttgagtaggaatctgtgtagcgcagtggttgagggaatgtcagacaggtctggttgaagtcatagttccagcaccgagtagctgcgcagtgctgggcaaatcactttgctctgagcctcaatttccttatttatggggataatggtatgtttaccattgggctgttggaagaagaaacggaggatgtaagctcatgcttaacacaaggcctggcctacactcagtgctcttaagtgaaagctgttgtcagtgagatgaattactttgtcataattctctgctcacctaactgtccatctggtctgcatttgattcctgagtaaagccatttgccagaaatgagctctcatggaaactgtacatttctgtggctctaaaccttgactcctctctttttctccatagcataccaagtctagcagtaatttgtgttggctctcctttcaaaatgcatgcagaatccagttgcttctctctccttttgctgccactgccctggttcaagctatcagcatctctttcccagaggactgtagtggcctcctaataggcctgcctgccggggcctttgccccctatggtcttctcttggctaacagccagaaaaaacctgctaaaagctaaatcagatcataccactcccctgcttgaagatgtctgatggccccatcacacttagaagaaaatccatatccagatccagtcccccaaaaccttcaggattccacattagccaacttttttgatcctatgcactctctcctaacacataggttccagctacagtggtcttgccacacaccaggcacactcctgcctgagggccggaaacctctctacctagaaacttgcaagctggcctttccatctcctttaggtctttgttcatatgtcacattctagctgaggccttccctgactgccttatttaacactgcaatccccaccccacactggacgccttttcctataactcatcccctactttattttacccacagcgcttgtcactatttgatccttatatattttacatatttgtctattatctgtctctcccactaagttccattacaaaagagtttttgttctttttttgttccctgttgttcctcggtgcctagattctcatagaagcaatgtgctaggtgcttaataaatatttatcatgtgaatgaatggtcagcccacttcttggggtgaagccttatgtgtatgctcagaaactgtcctggcttataaggttagtgtgggccaggctccccgagcattctttttatagagattctgctaaaatcaaatttctgaatcctctggactgcagagtcagtctggcaccttagatgtccctgatacccagcctaagctttaggcactgtgacacatacttttaaaggtggagaatgagtcagaatctgataaggtataaatatttggttactcacctcctgaaggtgaattagctctcacaggttgccagaaatatctctcggttccctgaagctgaaacacacttgctgatgtgcattaatagccaaaatggtaggaaatggcagagtctgccattattcatccacttaccaggggaggaaagaagataaatttattgtatatgaatgaattaacacaggcattgtgcctgttgagcaggtgtgcagggaaggaaagtggatgaatatgtgtgtgtgtgtgtgtgtgtgtgtgtgtgtgtttctcatgttcctatccttaatcaagaaaatggaatcccttctggaagacctcatgaccacatttgaagctctaccatttttctgttttggagaatagtggtttgggttttatagaaaaactggaggcagctctgagtaagagaaacatggtggtggtgatttcccagaactcatcgggcttctccaagttgggacacatgttggtcaaaggatgagctgctggcaattcatgatgaagacactggagtggataagacactcatggagacacttaaagcaggacaccaacctaggaaggatctggaagtagaagtgagtggaagatggcactaaaagtggaagaaaatcatgaaagacgtgatctgtccttgctgcttcagtgattacaagtgggctccagcagtccttccaatcagattctattattgaagaccagtgtattatttaaatgcttctctcaggagcttcgaaaggaggcagagcgaatagagagggaaagaaaagagctctcatgcctccactgtggcttggcactgggtgggtagggcacaggtgctggatggcaaagcattggcttgctgctctgatggccatgctgatgggacacagggaaggagaggcactgaacacttagactttcacagaattttcaatatcaatatgcaacttgtgataggttgtagttaaataaatttgttgttgtttattaaaactttttgcatcctcatgttgaggaactcaaagtagaaaataatgtctgtagagaaagtatacttttccccaggtgtgctgagtggcagctcttatccagtgacgtatactatcaaaaataccaacttggactctgtgatggttaatgttgagtgtcaacttgattgcatggaaggatgcaaagtatttttcctgggcatggctgtgagggtgttgccaaaggagattaacatttgagccagtgggagaaggagacccaccctcaatatgagtgggctccatctaatcagctgccagtgcaggtagaataaagcaggcagaagaacgtggaaggactagacttgctgagtcttccgatcctcatccttctcctgggctagatgcttcctgcccttgaacggcagactccaagttcttcagcttttggactcttggacctataccagtggtttgccaggggcccttgggccttcagccacagactgaaagctgcactctgtcatcttcccaacttctgagatttggggactgggactggcttccctgctcctcaggttgcagacggtctattgtgggacttcaccttgtgattgtgtgagtcagtactccttaataaactctccttcatatatacacctatcctattagttctgtcccttcagagaaccctgactaatacagattctgagggcagaaactcattcattcatctattcattcatatatccatctattcatttacttgctcatctagcaaatatattttgagcacttactatgtatcgggcagatgtcctgatacagaagtcaacaagatgaacaaatccctctcttgaagcttgaattacagtggggaagacaataaataaaaaatagaaaagataacttcagagagtgaagagtactgtagagataataaaatcagtgagtgatgtagagagctctgggggcttagagttcaggctacttcagataagatgattagggaatgcttctctgggaagggatcttggtgctgagacctgaacaatgggaggacccagccacatgaagatttaaagtgatgactcacaacctttgaagtgcattcatatcacctgggagtttttaaaaatagatggtggaccccacctccagaggtggaaatttaattgacctcaaggtaaggcttaaaattattctaatgtgcagccagggttgcaaagcaacctagactagaagtggaacttactagacagaatagcatatgcaaatgtcctcaggtagggaatggcttggagtgttccccaggcagaaagaaggtaggtatgactgaattagatggaggtaagaaacaaatttggggagggagtcagggattatattcgcttaggtgagctggtgagcatgtcacagatctagagctgggccccacagtacacagaagtacacagaaaacaagagctccttgctgcgtgcagtggcattgtcttgtgaggagccagggagttggaatgggtggtagggagaaaccccatacatttcacttcttcagtgtcatcacacagcaaactaatctgaactgcagaatttctctggtgatcagctgcctgttttcctggggtgatccatctatgaaaagtttccaaattgtgttaaaactgccagtttctcgacaaacagcacggagtgtactttccagggagaaaagttcaataattaaaatgagtcagcactgaagaactggagggcggtttgatctagtttagcagccgacgttttcttagcagaaaaatgcaatatccataatacataattttgtgctgaacagaagtcaactagaacagaattgtctcaggagggaccaaagtcagcttgccagaaaatctttttgaaggcagcagaaaacctggtcttcaaaagctgaagttggggagtggctgaggggccatgtctcaggtgcctacaggctggaggagctccctgagctgttttgacagggactcccctcttgctctctccagagcaattttaaagggcagataaacacaacacccaggttgtctgaacacctggagttcagaagcctgacttctcaccaccagcagaaagacctacttaatattgggcagctcttattctagggactaagtttgcctttgcctggggtgttaccacaggaggtgggagtttgggggtaattttttgtttttctgagaaaagaagagtgattaaaggagaaaatcatttcctctgggtggtaagggtccctgcaaaacatcccccgactgagcttccaggaagagtgaaaactgccaaacctgaaagtggtttggcttggagtctaagtccccaccagaggttgcaagtcctccctgtgcctgcagcacagtctcttcctggggctggctccgcgatttcaaaaacatagacaaattggctctcttctggcctcctgaagttcatgcaatcatgggaccaactaaatttgtgttagattatgccaaagactgaacaacattttgctttttttttttttttttttttttgcttcactgacaatagtccaagagaggaagccttcaattagagtagcagaaaatgctgattagaatcaatcaacacctctagaagtttaaacacttaagttaattaaatggttcagtaaacttgaagcgaaacttgcaaacagaaaacgcgacgtataaaaggatgcttagatttttaaaaaacagataattatccaacaagctcaacatcaacctcaccaaaggctctgtgaaaatgattaggcaggcagcgcattaattttcaatgcaactcacacttaggttcatatcactactcaaaagcaaaaactcatgactcctatcagcgggtgtgttgttctggtttcgagatatactattaggaaactggcaatgcacctgttgtattttagtagtcctgaatattttaagagatcactgtttccttaccctcagtacaaacaaaatcctgcaaagacagatctttcctgcaaagcaaaatcttgctggttttgtttaattttaggagaaggcccaatctgaatgagtgaaaacatgaaacacagattttttttcagacactaaaaatttgtaactcttctgctgcaaaataaagtcaaactagatgtcttctgttgggttcctttagacacagcctgcgatggagagtctagttcaagtgttttcctgaggatatggtccccagaaaaggggaaggaggaaagcgggacagagctgaaacaaatatctaagcaaagcttttgatttgcctgcagattgtttcagtctgagcccataggagggcgctggagtatgaatctcacaacaaaattagttccacctgagacaagaagatcagcctctgatgccccttggcatgtatctattagtcatgggccgtgggcttctgctgggggtgaggtgggaatgtggtagcctgttgagcagttagcagagggcagtcccccaggaaaagcggtggctgtgaggtgtaatcagacaaagtcacagctgctgggggagaggggcagcggctaccgatgggatctgggcaggaggtctacatgactggaccaaggaacttctgcctcatagagattgttgagtgatcttaggcaagacaaaagttgtctttgataaacaagcctattctaaagtgagagctaccccaggctccagacactatcttgttcacctctgaacataatgggtcatcaacaaatgtgtgttaagtgaatagcaaacagatcacttgcagtgtccactgaatatgatgcagcttccatgccctttctacgcatttcacaaacacccactgaagatgaagcaataacttgctacttgaggttcagtcccatcagaagacatgggttgagcccttgtgtagtttttcattagtaatgatgccttgtacctcagttgtccaatctttaaaatagggaaaaatcacaacatgacagggcttttgtgaggattaggagaaatagcacatgaatatacttagtaatttagctttttctcataaaatgtttttctttggaaaaatttcagaaaagctgaagtgcaggaatagagacatttaaagctaaaggattagaagcctctgataataaaaatttgctctgtaaagataaagcaatactagaactgtgctgtaaagtcaataggcaccggggattgatattgatctacagaatacacttgtaggaatgaagctactccataaagccaggcacattgagaatgagcatctcattgttttatctcccaatatagtgtgcaggtcaggctctgaactcttcttaactagaaagatagtgagttgcaaataaaacaggtgttggccattaatgaggtctctacgcacaacacttactatactacctctcagactatgtggagtggtttcttcttttgggggtttgccaaaaacaaagtaacattgcctacgaccttccttccataaaggcaggaggagggtgagtgtctttgtctgcacaggacacacagctgcaagaactctgtgacttggtgttcccactgtctgattatctgttgtgtcctccacagatcctcttttcttgcccctgctgggaagctatctctggttctagagcagaaggccatcacagaaactcagccaaacagtaaattggaggtgaggttttcaccaggaccatgaagacttcacttcttcaatcgggtaacttcccaaagaagtattttcctactttagagatgtggaaggattgggagctgctactcaagatgatcttacacatgcactgaatggtttgagcatcattcttatcattgattaaggggctggatcaacggctggacttcaggcatggtcagaaggaaaaaggagcctataattggccatttcttggctgggtcatgaccacagcaagggcatagatgtttaataggcagtgtaaggttacaattccaaatatgcattaactgaacccatcaatgatatctagcggggacaacgggaggacttgaggacaattgatgatggtaagtcatttgacaaaaatagggcctgaaaaaatacaaattttggttctatatcttttgaaaaatatcactccttagttgtcacttaagcctaggaccaaaggctagctagcttccctaatcactaggcttacttactagagcaaagggtagagtgtgggtacaggcatctgttgttatcttgcccagcatatatttatttatccctcttcccttggtaacagcacccttcctttcctttgaataactgtgcctactgcatttccatatggccctggggggcaccaatcctggtaccctgttcctgggtaggttcatgaccttacaggttggccagactcagtctcccaggaatctgaattataggtggagtgaaatatgaatggaaggtgaatgaagacaagtcaatttgatggcagttctcagaaagaatgaatcggagatccctggtactgacctgatgttcctgaccttcttgtggtccttgattctatgagttacttagtgttctctcaaataaactaatccttaaattaactagagtggcttttccgtttcttatagtcaaagaacactgagtgctccctgccatggtgcccctaaggagagaaaggccagtctctctttcttttgctctgtctgtatatgtgtgcatttgtgctggtataagcactgacaccagttcctgaggcctccataaaaggtacttcaggccccttttcaatttgagaggcagggtgtgatattattatatgttaccatccatctctttcttaaagaggcaaagtctcataggggaacaagcatagattttgcaatccagaaaaaattgagtttgactgaaaaaactgagttccgtcatttgcaatttatgtaatcttgggcaaattctgtatcctttcacctttgtcacctgtaaaatgggtacaataatacctgtcttctcacaggggtttgtgagatttaaggcagtgtataaaaagggccaagtattgtgacttgccctagaaaaataatttccttcctccctctggagctctttgggaggtgggctggggtcctcatcactatggttattttacaaggttggaccttctctagatacctgatgaggccacattcaggtgggtgggtagagacacactggtttcaaacatgggagatatgactgagaaggcgatgattgctcttgctaagacaatggacttcggtggtgatgggagaagcttagtttagatgcaagcaagaatgtgctcagatggagagagaagaaggaattacagacaaaagaaatctgcagaacaccaatttttaaatctacacctatgagggatgatttcagtttgtggcctgaggagagagtgggcagggaggaattggaaattacggctcttccttcacattcgtgattcggctaaatgggtgctcattattcagagaatgaaaaaaatagcagagcctggtaacacaagagcccttttctcaaattatcagtactttataagaattctagcttttcaataatcatagttcttatagctttatgttctcacattctaagtttgttgtggtgaaaagaacaaaataagggaggatgatgagttcatgtctttgtagggacacggatgaaactggaaaccatcattctcagcaaactattgcaaggacaaaaaaccaaacacctcatgttctcactcataggtgggaattgaacaatgagaacacatggacacaggaagcggaacatcacacaccagggactgttgtggggtggggggtggagggagggatagcattaggagatatacctaatgctaaatgacgagttaatgggtgcagcacaccaacatggcacacgtatacatatgtaagaaacctgcacatgtaccctaaaacttaaaatataataataataaaatttaaaaaaaaccaaaaaacatatttggggagaagcttccaagtaattaaaaaaatttttcctttttaaaaatttttgtgggtacataatgcttgtatatatttttgggctacatgagatgtgttgatacaggcatgcaatgtgaaataatcacaaaacagggaatgaggtatccatcccctcaagtatttaccctttgtgttacaaacaatccaattacactctttcggttattttaaaatgtacaattaagttattttaaaatgtgcaatttattattgactacagtcatcctattgtgtgatcagagagtagtcttgttcattcattcttttttttttcagacggagtctcgctctgttacccaggctggagtacactggctcaatctcagctcactgcaaactctgcctcctaggctcaagcaattctcctgccacagcctctgagtagctgggattacaggcatgtgccaccacgcctggctaacttttgtatttttagtagagacggggtttcaccatgttggccaggctggtctcgaactcctgacctcaggtgatccgcccacctcggcctcccaaagtattgggattacaggcataagccaccgtgcccggccctcattctttctaattattattttttgaacccattaacaattcccacctcccctccagccccctactacccttcccagactctggtaatcatcctccaggtaatttgattcagaattttgtgtttgttttcctaaatcaataactactatacaaaacgctgtgaaaatggctactattttctttcttttgctccccacctggggacggtcccctgggtcaccttactcagcagttctccctctagatttgatccagcaaatgagatcgagtgatatattatagactctttaatcattttcaggggaattgggttgggatggaagagccctgggcctggacgtgactaatctgagggaactggatcagtatttttgggagaagcacacctgaggcaagaaactacccccaaataaaaggatgtctaaaatgctcatggttctctccccttttttggcctcgaaaaatgatatttattcagagaaaaaaagaagagaaaaaatgccaagaagttcacccattggctaacttctctgtcccctcctggttcttgccagccccccagggttgagctctggttggagtgggtagcagggctgcccctaaggtgatgtcagtgacatggttcaaatactgtctcaccacttaccaaggtatgaacttggggttcattaagctgcagttccctccatagcatcttgtaggggaattatttaagcatgtgccgtgtaccctagtgaattacaggcctcaataaatgttgaattaggtataaaatcctttcctttatgcacccttcaatcttaagacctattactgaacaatgataggaaattggtttttcattcaacagaaagcccaaggttggtcaaggtcatggtagggccagcatttgttcatcaagtttatagtcttctgagctttgaaaatgttggcagggagatcttaactgggatgagacacagagagatgaattatagtgttacttgagtaatctatgcaataggttgctgccatctttggaaccctcacttgtgaaataataagaaatatacatattgttctctgtccccagtccctggcacagagctcctaaaacccttgtaatttcctgagtgataggagtgctaggggaatttttttgttctaatgcttggcttctgctgaagttcctgagagagagctccgaatacccctgtagacagaggtgctagaattttttagcatttggtccttgaccccaattttctgacacagagctcctaaatcccttggaatttcctgggtgataggagcatcttttgttctaatgagatgactcttggtgggcacctggctagcccaacattggcctgttggccaggaaaatgaaccatgtgattaaaagtagtactactatttgatccagcaatccagaggaaaagaagtcgttattcgaaaaagatacttgtgcacgcatatttctagcagcacagttcacaatcgcaaaatcgtggaaccaacccaaatgcccgtcaatcaacaagtggataaagaaactggtatatatatatatatatatatatatatatataatattacataaatatataaaaatatatatttgtgtatatatatacatgtatacatgtatatatgcacatatatgcatgtatatatacatatatacgtatatatacatgtatatatgtatatatgtatacatatatgcatgtatatatacatatatacgtatatatacatatatacgtatatatacatgtatatatacgtatatatgtatacatatatgcatgtatatatgtatatgtgtatatatatacacgtatatatatgtgtgtgtatatatatatatatatatatatatatatatatatatatacaggatagaatactcactcagccataaaaaggaatgaattaacaggatttgcgacttggatgagattggagactattattttaagtgaagtaactcaggaatggaaaatcattgtatgttctcacggatatgtgggagctaagctctgaagacgtaaaggcataagaatgatacaatggactttggggacttggggggaagaggaggagggggacgagggacaaaagacatacaaatatggtgcagtgtatactgctcaggtgatgggagcaccaaaatctcacaaatcaccactaaggaacttagtcatgtaaccaaataccacctgtaccccaataatttatgaaaaaaagatttaaaatgaaaaaaagatttaaaatgaaataaaagccaaagcagcttacagtaaaaataaatagataaataaataaaaataaagtattggaactttcagctccacctcaacctccaggaagaagagagaggccgaaggttgagctaatcaccaatgaccaatgacttaatcaattgtgcctaggtaaggaagcctccaataaacactcaaaagcactgagttctagaggttcctggaaggcagtgggcttggagagggcacagaagctcctcaacccttccccataccttgccctatacagttattccccccggctcttcatttttatcttttgtaataccctttgtagtaaactggtaaatgtttctctgatttctgtgagctgctctagcaaattaattgaacccaaaaaagtggtcatgggaacatgggttacaacctgtgcttattatttggcctctgaagtggggggaaaactaagccctccatctgtggggtctgttgctatctccaagtagatagtgtcagaattgaattgaataagagaatacccagctggtgtctgctgcagaattgattgcttggttgaccgtgggaagaaatcctcacgtgttttggcaaccagaggtcacagaagtgttgattgttgaatgagaggatagaaaaaaacactttgttttttcttttctccatatctcatactactgccctgaggatgtcttctatacctctacttatagcacagcatcacacatgggaagcatggccaggtccaaaattggtcacactttcctctgacctcactccagctctttattcccttctgagagctcatctgagcataccacacatcagcatgtgtgcaaaactacattacggagaagagggatttgatgaatcataaaatctcacacagtactggaaaaagtccaggataaatgggctttgaataaaataaatgccaccagaacccccacataaatgatgcatgacatcgcctgcaaattgaggcatgaaggcatgaaattttaaactcccagatggctcctccttgttcttttcaacttgtcctcacaaaacttgtgcaatagctacacctctcaccactgaacctaggtgacacctgaggttcgcttgttgctgaaaagtagactagaaagttgagtcattggggaattgaagggaagatccatggtgtatttcccccgtagcccagcatctaatacaaatttgggacacagcaggtctcagaaaatgtttttggcatgtttacaaataggaagaagagctgcctctgttcaagagaagttaagacccatcagatatctttcattcatgatatcccagtcttatgttggggtgatttaaaaggttaagtattggctgggtgtggtggctttgcttgaaatcccagcactttgagaggctgaggtgggagaattacttgaggccaggagtttgagacaatcctgggcagcatagtgagatcgtatctttacaaaaagtaaaaaaaagttagccaggcatggtggcatgagcctgtaatcccagctactcaggaagttgaggtggggggtgtatcacaagcccaggagttcaaggctggagtgagctgtaatcccacaactgcagcctgggtggcagagccagggcctgtcacaaaaaaacaaaacaaaacaaaaaacttttgcagccttttaaggaggcaatgaagtgggctttgatccagataggctggagtttggtgctcaactctagaacataataggcataaaatctctgaaccctggttttccagcactgaaaggatgataataatactaagagtaataataattgtggtataataagaaatattatttggtttttgtctgtggttcttgccacagaatttctaaaactcttgggatttctggcctggaatatgtaggcaggaggaatcttaagtaggatgggacatctagaatgaattattctattgagtaatctatgcaataggttcctgccatctttggaaacctactgcagtgaggaagtcttctgcacttccttttatagcacagtattatatactggaagcagtggacatgcctgaataagagtatcttttgttattcataatgaacacttttaatcatatctgagtttatgctaatgaggtgacttaaggtggggaccctagatagcctcaggaagaggctggtcaccagaaccaactcagtagagggttgaaacttcagtcccatccaccagtctgaaaactggagatataagctctataaaaagtcttgaacaacaaatgtccatcaacacataaagaaaatatggtatatatacacaatggaatactatacagccttaaaaaggaaggaaattatgtgttttgcaacaacatggatggaactggaggacattatgctaactgaaataagccaggcacagaatgatgaataccaactgatctcacctatatgtacaatctaaaaagtcagtgtcatagaaacagagtagaaaggtagttaccagaggttggtggagagagggaaggagaaagggtagaaaatttcaggtagactgaaggaataggttttagtgatctattatgctctgctctatggtgaccacagttaataataatgtatgtatactttaaaattgctaatagattgttaacattctcaccataaaaaaatgatgtgaggtgatggatatgtcaattagcttgatttactctttctacaatgtatgcctagatcaaaacatcacattgtatcccacatatatacacaattattatttgtcagttaaacataaactttattaggctgggcgtggtggctcatgcctgtaatcccagcactttgggaggctgaggtggacggatcacctaaggtcaggagtttgagaccagcctggccaacatggcgaaaccccgtctctactaaaaatacaaaaaaattagcctggcatggtggcgcgagcctgtgatcccagctactggggaggctgaggctggagaatcacttgaacctgggaggtggaggttgcggtgaactgagatcatgccattgcactgcagcctgggggccagagtgagacttcatctcaaaaataaataaactttattttatttatttttgagacagaatctcgttctgtcactcaggctagagtgcagtggctcactgcaacctctacctcctaggttcaggtgattctcctgcctcaaccttccaagtaactgggattacacaggcgcctgccaccacacctagctaatttttctatttttagtagagatgggtttcacttgctggccaggctattctcgaactcctgagctcaagtgatctgcccactttggcttcccaaagtgttgggattacaagcgtgagccaccgcacctggccagttgaaaataaactttaagatgtatgaattaaaaaaaaaaatcctatccatctggtgaggggtcataattatttttaaaaaaagtcttcgcgagatttgatgagcttcccgattggtgaacatattgaggtgctgagacggtggtgcacccaaagaaggcctagaagcttcatgcatattctgcatattcctcgcccctgccctagtcctgctgcaaccttacactgtgtacctgttccatgtcgctgctcctgagttgtatcctttataataaaccagagttattatgtttccttgagttctgtgagtcattctagcaaattatcaaacatgaagaggggttgtaggatttatagttgcttagtcagtttgaggcctagacttatgattggcctctgaagtaggaggagtctgatgtaactaaacactttaactcttgcgatctgatgttaactttaggtagataaatcttagaattgaattaaattgtagaaccgtcagctggtgtttggagaactggagaatttgctggtgttaaaaaacatataataataataataatgaattatgcttttacagcatgatttcagagacagctgaattgtctaatgcaccgagagtgactagaaggcaatagcactgtatgaatgcttattctccctcatgcctccccagccacttcaatgatctggcctaattccagtggcccacctccttgctccaacattaaggtccattgcaaatttgtaggtgtgtgtgacattttacccttaagaagcatcttttcaacaggactgatatgggtatcctgtaatctggttctatttcatgtgttttctaagttttctttaattgaagaaatgagaaagagggatatatttttgcagtcacagctcatgtaagtaactctgctaaacagtaggttgtgtgatggcctcagggccccctgtccccttgctcctttaccaaaattaacagtgtgccatggactttcatacagtttcttatttgacactcacattagccttgggaggacatttcaactagacatattatcactattttccaaatgagagaatggaatctcagaaagacagactacagtaaaagaatcaaagcatattaaacctggagggcatttgggagatcatgtggcaaaatccctccattttatgaagggaaaatgaagcctggatcaggaagtgatttgcccaaagccacatggtcactggtagaactgggttaaaaacccatttgtcttcttactttggtactttctcctttggttatatcatctaggcccccagtgcagattttcttcatagcaaatctagggtttaccatcccccgtccctgccaataccactgtctgtaaaatatagactcctcctcaagttagtttccctcctgttgaggcaaagattggaaaagtgtaattagaccaacaacactcagctttattaatgagcctttcaagatgctgcctgcttcccatgtgtgggactggaccaaatgggacagttgcccaataagagcccaaggaaagaagaatgtgagggatgagtcaatcctgggcatgtgcttactcaacctagactagcacatgtagttggtgggagaacttgaactgtgacagggaggatcaaggttacagctaaaaattagcgctgaatgtcaagttcaaaaggtgaggctagggatgaaattggaggatgaatcatgaagttgaagccaaaaggttcaagaaaaggatggattccgtatgagaaacgtggttcagaacctaggatgtgaacacttggtaagtgctactggtgcctgggattggtgcctgggatgtggtgatgggtaccatgcaggacaagacggcatctactgagtgctcccgcagatatcatctatgggaaagacacacactttagggaaataacattgtataatatcaaggaatgacatacatatggtctctggggaagctttttgaaactcagttcatctttcctttgatggggaaaaagcagaattagactgaaatcttttttagcctacttgtcattcagatagcatgcttgctgacccttttatctttgccgaaatcagaatccttcatgtctgctgcatgcgctgtgcaatgctatctggacttcagtgtgaagctgtttttcccctctgccctcttttccatctgtcctcacatttctgagtacagattaaaagccttgcactcattagctggggcaccactgcagccagccagcccatgtttactgggtgcccatggggtacctggcattgccctgggcacctgcgagagaagccaagggctctgacatcccttgccctgggttctggctcccaacggtgctgcagggcagatgaacaggcctgacaaatagtaatcaggaggatgaggggggactggaagtttggaattttgagggggctggagaggaatgaggttttggatagaattagaaagtgtgagattcagtaaacagttattttaaatgaaagaaagaacttccagcaagtgcagtttctattactgtccttgcagagtggcagacacacccattctcatgaattctgtaatggatggaatatgaaatattgccaaaataagtgacattccttggttgggagatgtattgaggctatttggttctgcctgcttatttcctgcttaaggaaacttttccatatatgtgcttaggagggtctagttgggatatgcactttcaaataacctgaatgttcagaatgggctcactataaacaccggcagttgccaacaaaagtataagatgggctagaatttccatgctttggatgaggtaaaagaggcccaaccacttctgaatgaaaagttattcctcactctgtctttgcttaataaaactgcactcactctgaacttcagaaatcaaaagcagctttgatttgttggggtggaaaacggtgggtaaatttttcctttttttaaattttgttttctcagaatatcattatgatatctgtgcaatgtggaaaaacaattatctgctctctaaagagatgaaggtttgcaactgaaaatacaatgtaaaagagagtatttctcttcctgacttgagaatgaaactaaaccatgcctatccctgaagacccagggaaaattccattccttccatgcaattcccctcttaaatatctttgtgcttccccagggcgcagcacattggtgtgagtctactggccgctcagtaaatacctgaagataaagggcatagtaatagctaatgtagtcataacagttttcactgttgagtgcctacaaggagccagctctggtaggagcagttttatggtcctcaacagtcaccatatgcattccttataatgagccagcaaaaaaggaattatatccaatttcacaaatagtcagcctgagactcgaagaggtgaagtctaaggccacacaatcagtaaatgacaggactgtaatctgattccaaagcccctgctccatgtagatatctcagtggcttctgcacaggacaggacacaagttgctgtgaccagctggtgtgcttctctttatttgcacctggacaggccaaggattgatgagtgggccggagcccctttgaaaatagcttttgaataacccatatgagaaaggaccagtaagttggcttggtttcttggttttctcattgctgtcggcttgaactttaatagaatgcacaccttcctcttttttagtttcactaaatgtcaaggttacatcagcgtgagccacttacttttcagggagggaagtgtgtaccactagtggcccagcatatcaacaaggcaaggaaagctttcccagtaaccctctctgtggcagggccagcagtgcagccctcttgggtgtctccacacatccctaggatgtgggagagggcaaagggaggtacccagtggccacttgctggctgattgataaagaatgatttttggtttctctctccttctccagcatcctgggggggtgtgtcagctcactgagagagaccctttttctcttgagatttctctgccctttctctgcacccatcccacatgcttgtttctcaggcttgagtagaaggcagatgttcacagtcagctgtaatgggccctgggcttgctctttatacatatatgtgtgcacttgtgcattcattatttattgagtgcctactctatgctggacactgtgttctaagcgagacaggaaccctgaactgtcttgggggtgggaagaccctctaggtacaaaaaaatgtgaagtgtaatgagaacacacttacacattctgccagagccccaaagagtcattcacctgtcggggagtgaaagtagtgatgctggtggggttggagaagtcttcatagctcaggtgcacatttaaactgaatcttgaaagagaagtaggatttgataggcaaacagggcaggaggatggagcgttctgggcagatgaatgcctatgcaaaggcctggataaacgtggttttcagagaagaaactgggaaatactcattctctgtttatgtaaatgtgatgcctcctttaagtccagcacgagtcccactttctctgagaggctgatctacactattccaggtaaccccttgctctccttttaaaataatcctgatgttggtcaaaggattcaaaatttcagtttagataggaggaataagttcaagagatctattgtataacacagtgactgtagttaataacaacatactgcactgtatacttcaaagttgctgagcgagtagatttttaagtattctcaccacaagaaaacgataagtgtgcaagatgatgtacgtgttaattagactgatttaacccatccacaaaataagcatatttcaaaacatgttatacaccaaaaataaatacattttaaatttgccagttgaaaatttttaaaatatatataaaaaaatctgtagcattatctgtctatacttaatcaactaggccttgtgttgttacttaactctccaatggatatctattttttccccttaactatactggtagcctttggaaagcacagagcatattctatatatattctgttcccctactatgacaagcatagaacagagtacttaaaaatatttaacatgtatctagaatgagccagaaaaagactttagagatttttcagagaactgccctcatttgacaaacaagaggctcagaaaggggaaatgaactttaatgaaatcatttggtggcacaggtgggatcagaactcaggtcttctgattctcagttagtggcctgctggtttcatcagctgcttccctgtttgttgtaggcagctggatagatggacatcatgggtgtgtgatgcatgtcaattgcagccttgtctcaatgccacccactcttcagctatttgctaaacctcttcatctctctccctgttgcctccacaccatcttgggggaggcaagtttgtattttcaaaagtggagactcctcagcaatggactatctcctaccagagccttctgaggacacctttcacagagcagttggcatttgtcgggggtgaggaggaagggagtggagaggatgtaatctcctgctttcacttttaattcttcaggaggaaaggtcttccccccatctctgatgagtgttttcagagtaataatcacctgtggagtaggaggggtatcccacacatttttaatgaacccagattaatgagatgtcaccaagacgatttttttttttactttaaaatgaagtttcttttgtctcagagcctttgattcagaagatctttatgaacagagatggctccatgtgagtgatgcccagaaatgccttgatcacatacagtggctcatgtgggtcctgggctaagctgtcactttttacagctatgcctcaggaagtgggcagtccttctcctattctaaaaatcaaaataggataataatgatatttccttacatttgtaaatagcaacttgcaaagtactttgagtttgataaagcactttaaatgcttcattaatttttttaaagatgctatcactgattttacttcatgtccatcctatttatttatcaaatatttattgagtgcctattatgattctaaacattaggaacacagcagtgaaaaaagacagacgatgcccctgttattgcagaactttcttttttaaaaataaaagacttttgcagaactttttttttttaaagacttaaaaaaatttttttaaggacggggtctcactgtcacctatgctggaatgcagtggcatgatcatagttcactgcagccttgaacacttgggctcaagcaatcttcccacctcagtcccttgagtagctgagactacaggtgcatgccaccacacccagctaattttttgttgttgttgtttggtagagacaaggtcttgctatgttacctaggctggtcttgaactcctgggctcaagtgatccctgccttagcctccaaaatttctgggattataggtgtaagccactgtgccagacctttaaatactttttattttgaaataattttgatctgtagaagagttaagatagtacaggaagtttgcatataactttcatccatcttcccttaactttttttttttattgaaactaagaagttaacattggcacaacactatgaactaaattagagactatgttcagtttctactactttttctactactgtcctttttctgttgcaggatataatccaggatctcacatacaattagttgtcatctctattcagtctcctccaatctgtgatagatcctcagtctttccttgcttttcacgatcttcacacttttgacgggtacttatcagatattttgtagaatgtccctcagtttatgtttgtctgatgctctcttacaattattctgggcttatggatttttggatacatatcacaggggaaagtgcccttctcttcgcatcagaggtacccaatatccacaagacgtccctggtgcagttagctttgatcacttggcccaggtggtgtctgccaggttccttctctgtgaagatattattttccatttgcttttctttggaaggaagttactaagtcctgcccaccacactgaagaggaggggaattagcagagcttgcttttaagtaaaaggagatagaaaataatggagtaaataaacatgaaaaattatcaatgaatgatcagttttgagcagagaatcaaaactaagtgatgtgattgtgagtgactgggtggttagggacagtttcagctgatatccaaataataaggagttggccatgaaaagaccagggggaggagcatgctagagagagggaacagcttccagtgcaggagcaaacttggcatgatcagaccatgcctctccccttttcaaaaccctccagtgactcccgttccaccagagggaaagccacagtcccaacactggcccacacaatctgcacaatctgtcccccatttgacctctagccccaccctacaccttgctattcctcaaacacaccaagcacactccacacttaggccttggtgctggcagctccttatggagaaactgttctcctttttacgctcatggtcatctccctcacttctctaaggttttattcaatgtcatcttttcagatgcttaaacttttttgtgtgtgtgtgtgtatcaccacacacacatgcacacacacaaacaaacacacagtgagtgagtaggtgccccagtccctagaagtattggcacgtgggttagagggaagcccactgcatatggacttttcatatgggcttggaaactttcttaagctaactgggcatgcttgaaaagccaataggcaactgtgactctttagcacccatctccttaaggttgtttttttctgacagttatcactgccaagttgacaagcaatcaattcctttgctccacgctttagacactgcctaaatttcaggtattagcaaattcttctgctccctcttcatttgctggtgactaaagaggcatatgcatcatgcctcctaccagctggcatgagttatatgatatcatatagtttctactaaacctcatacatctctgctttctctaatgaggtggatgtggatattgaggttgcatttcttttcagagaaaataaaaggcaagtcaatccatgtggtcagataaagggaaataagtcttgaataggaatctctcctaaatggccaatgaatcagcatagaaaatgcatcagtgaggcctaagttagtaccacaataattctcattttacagatgagtaaactgaggcagggagtggtaaataactttcctaaggctagtaccaggagcagagccaagagtcaagtctaagcaatctggatgtacccacaatcctctagcagtggctccagtgtggaggactcctattgtagacagtgccttctcctagcacaacatcagcaaagaaagactgtaaatatctccttactagaatggaagctccctgagggcaagaattatgaattactcataattgaacctagagattggcaaaataattcacacagtaggaactcaaataggtatctgtgaggaattaatattattcattatacagagttttggattattcattattttggattagtcattcttctgtttctttgatgaggaaggcatcagagacactggtcagactgtaatgtaggaatctattttccttagttggattccttttctacactttttgggcattatttcctcatagaaatgttttgtaaatgtggccagaaaatcaacagggacttaagggaggttaaaggaattaacatgtgtttgcaataaagcgagtcatgctatagctaagaaagtagtggttttgtaaattaaaccctgaccccagctctgaactcaagcaaacattctttttcctttagaaaagaaatcaaatacatgccagtatgaaaaaaatgcatcttccatattaaaggtccactgtaactaaacttttaattaaaatgagcacaaaaattaaataatataacctgcaatgttgatgaagcttagcctctgtgcaagaaagctatgtgtttctaacctgttgacatttttcaaaacattaataatgggaaaactatcccagtggggatatctcagacttaaatattcaaaaggtttttggaaagtgtcctacatctgggactgttaaaaagataagtcaacacagggataaaaaaaaaaaaaagtgcttgggttgttttagtaccttggaaaggaccgatactaaatagagttgttatagaccaatctcctttgcccggataagacggtccctgactgggtgtggatgacagggagctagaaagattggctgaacatgatggtgcacacctaacaggctccatatcaagaaagggaaatggggccaggcacagtggcttatgcctgtaatcccagcactttgggaggccaaggtgggtagatcatgaggtcaagagatggagaccatcgtggccaacatggtgaaaccccatctctactaaaaatacaaaaattagctgggcatggtggcatgtgcctgtagtttcagctactctggaggctgaggcaggagaatcacttgaacccgggaggtggaggttgcagtgagccgagattgtaccactgcactccagcctggcgacaggacgagactccgtctcaagaaaaaaagaaagggaaatggattctggtcaatgagtaatctggaacaatataaacaattctttttgctctgagttctagaaactgacagggagacaagagatgtggacatatctgatggacaattatgttagaaaacttcctttggtggtggggggagtccttgttttaactattctgtccctatgttagaccacatacctaaagtccgcatttttaaaatctatgacatctcatcagcctactactggaaaagacacagaggaaaggggctggtaaaaaaaaaaaaaaaaaaaagatttatttatttatttattttgagacagggtctcactctgttgccgaggctggagtatggtggcaagatcttggcttgttacaacctccacctcctggattcaagcaattcttgtgcctcagcctcccgagtagctgggattacagacacccaccaccacaccgggctaattgtatttttagtagagacagggtttcaacatgttggccaggctggtctcgaactcctggcctcaagtgatttgcctgcctcagcctcccaaagtgctagcactctgtgccagatccagtgctaaggttatctcatactaactcattttatcccaacaacagccctttgaggttgacatcattattattattattaccattcttctcactcaggaagagcctagataacttatcagaaggcacacagtaggtggtagagctgtcattcaaatgtgcttgcttgaagctaatgttaacgcctgagcaactcatctgagcccaccctgtgatttttacattgactggcagaaacgaaggagagggagaacaatgttagcagccaggaagatgagtcacatggctgtgatgtgccactgagtccctgtgatgaggaagactgttgtgacactcaattacaagatgctaaattctttgagtgtacattatggattgcttatagttattctttctattaatgggtgacactcctgtttgtctgggatgcttttatcctatttcagttatgttcatgcttctctttcaagatccggcttatgtcagaaagccttctccatccccctaatttgagtcggatgtgtcaacagcacttgagcttgtgaattttgtcaggctgatctgaatagaactgtctatcttcccactgtggcagacatcttttagggtgtctgcataaccgacagtgtctgccttcaccagataactgttctccccaccatacaggcaggtaaccaagacctatttatctacctcatcccacatggatagctgattgggtcagagaggacatcagatcctctcggggaaaaccaaatttcttctttggagaatgtggaattgggataaagagccagacagctagtcagtacaagaaggtcttgcgccaaaggaacataaacttgggagctgaagtgggaccatttctgccctctatatacacagaaaataaaaaataaaaaaaagacagctcatggggagaattgagaataaggccgtcatgcagagatgggcaatggagtaggagtgagtccctggcttataaccttgtttcagttttggcttccagttccttcatttgtccagttacccttgagttctatgacatatcccaaaggtattctagtaaatcccccttttagtttaaccccatttgagtgcgtttctgttacttgccccccaaagcactttacctaagatgccgtcaggaactagagcccccagaggacagtggcaggatttgttcttgggtgcagccctaaggtagcacagttcctggcttagttatatgaatttttgttgaattttactaacttaatatagcttttctatgagatagcaataacactacctggtcctccccaaattgccacacgctccagggaattagatgaattaaagccaagggctggctggctccattgaaagccacgcttcgcctcactgttgttccgtctcgtttccagtttgagaaggcagggaggctgggaagctgaaaagcactcagaagacagggaacagcaggagaaagtgacaagcgagacaggatttgaaaggggcttgttttgagtgctttggaatcaacttgttctttaattaagggggaaatatcaccctccagctagtaaagacacccctaagaaaattaaaataatgtaaatcaagctaaatgaatactccagaagcggcactagagctttgtaggattgagtgtttggatgcccctgaggttttaaaagcaaagcttgcaactgctttttggagcagaaacattctctcttttgtttgatggcaaaggaggctaaatgccgacaccaataggattcacggaggagttggaggtgacagaatcttcttactgtttcggctctctaaagaccagaattgaaacaaaacctaagtagatgatgctgataaattcctggggttgcttcctaggggtgttcaatgcaaagaaatcatttaacttgtaattaattctacaaagcaaaatggttcaaggggaacctagagtttctagtaaaataccttattaatcacaggggcgttttacctgggaggtgcaaaatgactgaggtgtgatggggtttgtgtgtgtgaaagctactagtatggtagtggcaggagcaggaggttcaatattgcgacaagaaaaggtcgcagatccaagtgagcagaacaatctgagctttactttttcatcaaatgtcttaatttcccaagattttaccttaaaggaggtatgaggatggttacaaagtgtgtactcaatctttggttggggggggggggttccaatgtaacacaaataatttattacacatcaatgtttctgactctcaagatagcatcatgactccttaatcaatggtttatacgtgatggcaaacttgtgcaagaagattttacttccataggcctcttggtgctggaagagctactctagtcctttcatttctggatgaaggaaaagagatctagagagattaagtggcttgccaaaggtcacctagtcgtagggtgagcatatgattcattgtgcaaactggaggacttttgaaggtgaaaggatgtactataatattacagttataccaggacttaactggtgtcagactggactgttcgggcaaggcagggcaggtgatcatcctatttagacagctcagggctttgcttcaaactcacaaggaatgaggaatattctatttgcgggtcttctttgcaataataaactgccatctgggggcagggaagggcaccacctggaggccaggaatgggagggcgattccttgcaggacctcaggctgatgggttttctccacaattaagtgtggttagtaggggcttgactgtcttctgcaggcctgagtgaatgtcttagtccattcatcagaatatctgagatggggtaatttataaagagcagaaatttatttttcaccgttctggaggatggggagtccaagatcaacacaccagcaggctcagttctctggtggaggctgcatcctctggaggggaggaatgctgtgtcatcccatggcggaaggcaaaagggaaagaaggaggaggctttttctcctggcagccttacagcaggatgccttgacactgataagaaaacagcattagaagggcccttaacccatcttcttagaataagggtttcaggaaccaactcacaactgctcatgtaatttttaagaatttcaccttctgcatgggtgctactctggattcttgttagatatggatggaggatagaaatgctgaccctgtatatatgcaatgtggaatattacacagccataaaaaagaacagaatcatgtcttttgcagtaacatggatgcagctggaggccattatcctaagtgaattaatgtaggaacagaaaatcaaatactgcctgttctcactcataagtgggagctaaacgttgggtactcaatggcaccgacagacactgaggactactggaggggcagggagagagggaagcaagcgttgaagaactgactgatgggtactatgctcagtacctgggtgatgggatcatctgtatcccaaacctcagcatcgcgagatatacccaagcaacaaacacgaacatgtaccccccaccccgaatctaaaataaaagttgaaattatttggaaaaaaatgtgaaccacagatgatgcagcttgaagaagcatgtcattgctaataaaaacaaccatttttgagcactcattctgtgcaaacaactattctgagcactttttatacattgatccccttaatccataaaactactctgcaaagtgaaactgttctgtctcctgattgtgctgatggtcatccaaatctatatacctgttaaacttcagagaactttatgccaaaataaaaaagttaattctactgtataacttaaaaaacaaagtaaaaaaaaaaagactatatactgtataagtccacggattgaaatccaggaaaggcaaaactctagtgattgcaaatcagtgattgccggggctagggtaggagggaaggactacagaagaacacagaaactttttgggttgatggaagcgttctagaccattttggtcatggttacacaactatgtatttgtgaaaaagcatcatattgtacagtttaaattcttaaattttttttgtatgcaaaccatacctcaacaaaactgggggaaaccaccctgtagaatggacatcactcatatttgtcccattaatgaggaaattggggcacaaggaggttgaataaattgcctagggtcacagctgatagagccaggattcaaacacaggaatgaataattccatcaattttcacttccacaattaacagctgctcatgcaagtaggtcatggcccttaacctgggtcatgggaacacattagccctagagaggcagctgcaacaggtagaaaatgcttgacccccacagaggactttacagaaacagcagctgttccgggatgaccatttgagtccacacacaattagtctttcccaaagcagacacaattacttgatttgaaaaactggtgccaggatgctaagtcctgatgcagatatctggtggcccctgggccttcccctttttcctggctgggagtgtgatttaaaacctcctggctaagctcattttgccaaatagctcctgcaggattcatttccaaggctgagtccagaaatttctagctcagcaaatagatccaaagcaagatgacgaattcacccaagctacctctgagactaaggaatatggtttcttgtgctttgcagaggcaaacagatgtgtttatacacaaatttacacacataaaatgccttgcttgttataaagaagagagaaaaaatgtaactgtacatctgcatgtacagtagcttccatctgggaactgtaacttcccagtagctgtccatctgggaggagaaggtgaatgaaggaatgaaggtcctccgcaggaacacagaatgatgctgtgtcatatttcacaccgctgctgtactacttggagaaataggctcctgtctcactttacagctagaaacagtgcagactgttcttaaggctgatgcagaattgagaggaactggaagatcatctcaggtaacacaatcaggcacttatgattagaagaatggacttacccaggatcaagcagctacttagtggcagagccagagaggtaaggtgactgtctaaggtcactcagtgcatagctggagtcagagacctgggttctcttccctggaccaaccatgcaactgaaagcaggttctttaacctctcgaggtttctgttccttgaatataaaatggtgctaataagtgctagctcaaaagcttattgtgaggactgggtgtgataaggccctaagcacaatgcctgagacacagtacatgctcaataaattacagctgatggtagaagtcattttagttcaccgtggttatgctaatgtatcttatcttcagtttgggctagatgagttctaaggtgaaccttagaacttagttattggctagccaataactaactgacttgtacagcactttatggcttaaaaagccctatcacagaagagttttctttgcattgcacaattaccctataatatatatatagaaccagcacaattagctccatctcccagtttaagagactcaaaaagccaaagcagtttactgaattctgccttttccaagatcacacagccaataagtggcagagaggagtgctgaagtcagatcttctaagtcaaaatgttgccttctgtctggtggcccaagtgtccaactcttaggccattgtccttcccttagtgtgtttgtccctgcttccctacagccccccttccaggccaagccaaccattgctcttggagtgtgcctctcaccagcagatccaatgaataatcatgacagtaaccctactgttgcccttttactgcagagatggggatagatttatagaggctgactgtggctggtatttgggaatggataatcaccttcacttactatatcctaggctgcttcggctaaatatttactgcccagaattctgccctttccaaccaattctgaatatgagcatggcacaggcaactaagtggcataattcatttggggcaaccataaatctaaggcttccaccagaaatgatgcaaaaaattaatggaacatgaaatcaagtaaatggaattgagtacagtaattagttcatattttaatcctcaggtctgtttattatctgtcaactggcgagcaattaagttggcaccattgaaatgattagctttgtttcagcaaaagtttatcgatatgtcagtgcaaatggatccggtggttttaaatggccttattttgaattgtagagcagcacatccatggagcagctagacatcgaatgatttaatttagcaatattatctggattacttatatttaatattactgaactgttctggagggttatgggggaatgtgggcgggggagatttaaactgcacaaaagcattgcttctgttcttaggttcttaatgcaatagtatgattgccttttcatattgagaccaaggaagaacatttaagacactatattttagtcttccaatctttaattctcacatttatctcaatcaggcactattatggctcgctctcacattggtggtcttttctcaggggtgatttggtgatttctagatccacttccttgtggatgctcatcatggcttatgttttgtgaaataatctcccaatgtctttgctgttttgaggctgactctatagatgcccttgcgatggggctgtgctcacaaatgcaggaaatgtgattctcaggctctatttgctctatgaggtgactaaaccaggtgacctaagaaggttttttgaatcttgggatttgacagaattctaaattttatttaaaaagttaaaaatccccaattaagagtcaggaaacttgggttctggtcctaattctgccgctaaatctctgtgaccttgggcaggtctcttgccctttctggcatttgatttttcctttgtacacacagggggtatgctggaagagatggcctcaaaagttcctcctctgacactgtcactttagatggacacttggagtagacttgtcctttccaagtccaggtctatgtctggaagtgagagatgtgacctttcgtggaacctctacaaattttcattggccactgatagtatcagagtcccaacgaatataggtcattcttatttaacacctctttttcaaattgattttattcctgcagcgttggaaatgagttaaaaaacacagctagttcacggaaatgttgtgagcggtactcatgcctgtaactgcagtgtcactggttactaaataaacgaaggcctcattcaacacttgtaaaatgataatagccatggtctccatggtgacaggtctgaggcagaaccctgatcaaattccagttaatgcctgtctttaatattgtcttttgtaatgtaacaccttcctcctttcttccgatgaagcatcagcagggagatcagagtcaagtggaggaggatggtggctgtcatatgccatcctgggggtccaggccagagttatgatgcagattaggctggagtcaatgggataatgagttgaccgcaggaggctgtcttctaatgcaatgccctctctcttaggctgcactagtgactatccaatactggcaattcaggaactgctgacttgattgggctgtgctttcccagaagtaattataaaaatgtccagagggagaacttcctctccttagatcagagtcatcatatgcttgctggtattgctgtaatgtgccctaccaccatctgagcttctgcctctgctttgcttctcgaaggccagtttgctcactctggtgggactggctcttagaatctagaaatttgatgtctagcattggcaaagctccttagtctgatcctaggagtaattccagggctgaaatgaggaatctaaatgaatttttctggtacacaggttctcaattgttccattatttctcccaggtactccgaatttacttaccttgtatttgtgaataatttaacataaaaaattctagaacctctgttaatattgacaactttattaggtttgccattatgactatacaatttaattcatgatctattgggtataatctaggtactttgaaagctacattcttaaattatcttcatttactcatttaatctctactcagcaatacgtaccctgtgcccattatgtgtatggggagatatttaaaaactacaacatactctgtgactgtagggagttaacagtctgattggaaagacaggatcctctactatactgtaggctccttacaggtaggcactatggcctatcagtctttgaatttccctaccaagctagggcccagagcagatgcgtaatcattcgtattgggtttatggataaattgtgggctatattaggcagtgttatgaatcagaagacccgaactaagtccaatcttggttatttattgcctggatggtcttgggcctttgtttccccaagaaggtggtaacattgagagcaaccgccttgaggtttatgatcaaatgggagaatttctgtctctgtgctttggaatttattcagagtaaaaaccaaagtccatacaaagtgcacatagagaggacccacgtggtctgcagcagcctctggccctgctctgacctctccgacctccttccccatcactcacacatgtgctcatgctgcttccgctcttccttgcatgctcacagctccctcccacttcaaaatcatggtactggcgattgcctctgcctggaatgtccttccccagacatctccctggcaacctcacaaatgtcatcttctcactgaggcctatactggccacactatttaaacttgtagctcactccttccactcctcattctctgatctctcttgttttgctctagttctctctccatagcatttatcatattctaaatttacatgtaaatttactcatttattatgtttattatttattatctgtctccccccgctagactataagcaccttacaggtagacatttttatttgttttattcactgtagcacataatagacaatcaatatttgttaactggatgaatgaatgaaggtaaaccacaaagcatgtgaacagtggccaagtgttggcagtgagattctgcagccacctatgggcatgactgggtgagctctagattgtgctgcacagtaactaactcaagtctgtgccttgtccttccagtggctcttaaatccctccagggtagcgcttaattgttcaatccttttgtgtcctttaccacatttgggatagggctaggtggggtgccttctaaatacattttgaatttctgaaagcatatttctttcccagagaaattccagaacatgtcttagtagtaactgcaaactgaaccactcttcctcttttacagtttctaatggaatttaatgctttgggtagccttcatataaacactccatcttcaagttaaatggggctgtatatttctgtatagtgaatggaggcaacatactttagaatttcagggaaaaaaatgcctataagatttttgttcctgggacacaaatggttgactgagttgttgattcagtggtttaatgactcattccacaaacaccacttaagcactgactgtatgtcaggcactgtgctaggtgcatggcatgcaaagatgaataggtcttgtccttaagaggtttaccaaggtcatttattccctcattcagtaaatatttattgactatcctcaagtccagacaatgtatgaggtgttgggaacacagcaatgatcaatataaaattcccatcaacaaaggactatggttccaatagaagtgagattaaacagttacaaaacccacagtgatgggcaacataatagattggggtcagctaaaaaggccaggtagtaaatattttggcttctgcaagctgcatgtggtcggtcagtttctctctttttaatagcatcctttaaaaatgtaaaccattcttagctcctaggctggacttggtccacagggtatggtttgtaaacccctgtaatagatgaatacacaggatcctctggaagtcaaaaggaggcagcaccttcctgtctgggaggagagaaaggggcttgggaagctatgatggggaactgtggtggatgggggaagggagatggggctggcattcagagtagagggagcagcttcaccatggcatataagtagcacttccatatgtattgtccatgtacctgtccttatacatcccaatcctcatttcctctcaatctccaattgtgtcaatggagcatctctaccaggaggtcgtggcagagcagcaaagtgctaattacattgcctgagcactcctcacaagccattcattgcctaatggggccctggctctcaaggatgttctcctcagcacttttcataccctagcacacttcaggacaatttgatgttagttgcttattcctacaaatttgtgttgctttagtgaaaccagcctctcaaggatgcaaataattgattcctggaagaggacaaggcctgcattttctgttgttttgtttcagttgttggttctgagataattgttttctcttttctgattcagagccactgagagagagagagaaagcaagagagaaagccccatattttacatatgactttaattctccccttttaatgaaacacatcctatctatatcaccatagcaacagctatggacttttccctctctcagatgtgttttgagcaggatcagagattccagaggctgagagctagcaaggtcaaggtgtttctatcttgctgtcagagggagcagcaagtgggtcaggttgcacagctgctcacccattctttgcttaatgctatctagtgagagctatttcataatccccttctggaataagcttcaaatataatccacattatgtggtattatcaatatacatccctcaatagactttacacatctgtgggcagaagctgcactctggcccatgcctagctcggagcccaccacatggcagaagcacaagagcatgtgaagagtggatgaaattaacaggaggaactggctatagatcttgcatgaagtggctggtacaattctccgtgtacccttctgcccccttgaaaagaagaacttaaggaaggatttttaaatgaacttgtctaatgtatcccaaatcaggaagattcttcttgtccagcccccactactgcaatggaatctaaggcatgtttcttttcaaatattattttttccctggctaatgtattttcttcttttcataaatatcctactttatactggacattaatctaaccatttagacatgattagcaagctaagggtcttacttattaaaaacagttcatttttccttcttaaagaaatggagacatttgaatccctgaatgtgctcatttatcaccaatccccaacaaggaatccaggagttctctgtgtaggacatgagtaatttttataaaaatgcagttgctgactatgtcatacatccatgcagctttataaaacaaagcaaatgattaccatcaattacaataacctcactagacaagactgcaattaatctatagctcttcagataacgactgttgcactgtgccaaggaaaatgcctggcattaattgacttatcacgatcagcagtgatagatagggcagatggcaatgtgatcattcactgtcaacaaaataaacacatgctttcttgctagaagtgtctacttgggtcctctcaaaggatagccaaaaatagaggccaaaggtggctttgaaggtagcacaaaataaaaattaagttaaccagattcgcgcaatctacccacataacaaacctgcatgtgtacactttaatctataataaaagttgaaattcattttttaaaaagttaaccttcagggtgagatatgttgacttttactgaggctaatcctcagtagaatacaattgaaggaaatttctataagaaaatcatggattggtgcagtggctcacgcctgtaatctcagcacttcgggaggccgaggtgggcagatcacttgaggtcaggaattcaagaccagcctggccaacatagtgaaacctcacctgtactgaaaaaaattagccaggtgtggtggtgcacacctgtaatcccagctactagagaggctgaggtaggagaatcgcttgaacccaggaggtggaggttgcagtgaaccgagatcatggcactgcacttcagcctgggtgacacagcgagactccatctcaaaaaaaaaaaaaaaattatggattgtatagaatttcagcatcagaagatacattaaaactgacagtttcccctgctcattcgaatgtgagtcacctttatggagtcaccaaattctgttcagtgcttaataactccagtaatggggctgagtgcagtggatcacacctataatcctagcactttgtgggggggccaagacaaaagaattgattgagcccaggagttagaggttacagtgaactgtgatggtgctaccactgtacttcagcctgggtaacagagtaagaccctttctctctaaataaataaataaataaataaaataattccagtaatatgaagtcacaattttcagaggcaaactcatttcatcactgtatcgttttcatcgttagaacacatatgcagctgaattccatctttttgtagctaccacccattggccataggtgtcttcccttatgctacacagaagatgccaaactcttcttgcttgctgaaatccgtaaatgggatctcaaaagtcaactgcttatcgcactactttgcatatagcattgtttcggggactctgaaattctggtctcttgcacctaaacccataccagttcgtctatagacccctgacattgagaggcttggaaagaaatgtgatacgatgactgcatctacccagggcaaggtagattatacctatgctgaggccagtgctcaagcctacattggagcagtggatgtgtgtgtgtgaccaccctacttgggaagctgttctccaagtctcattagtctagatagcatcccagccttgccatttccaggggacaattaccaatgtgtgtgccttcccccctttttagcagtgtgattttgttgattaagtcccctttgtttagaaaactgggataattcaggcggagtttcacctaaaattgtcacagtggtcgctaaccaaaatctcttggggaaagttttacaaatgtacaaacctggatcctatatcctgagactgattcagttggttttgggaaggactgagaggaaaatattttgacaaggcttcccagttcattgtgatttgcaaccctgcttacatgctttcttcactcattgctttcttcactgggaacacataataatgtaccattgtggaagtgcttcacaaacctaatcgtcagactctcctgggaacttttaaaatgcaaattctttggtgcacctgatacctgtggtctggtgtaggtctaggaaaattcatacactaagagatcaaattactatatgtttcccttaaggattttggaagcactcatttactctaaaattgtggttcacgtataagttacaaagcacccttatcatatactgaagaaacaagtgtcactaaagaataatacaatgtaaagattttagcctagtaaacatctacattttatcaattattcatttaacaaatatttctactctgaagcagtgttgtgataggtgctggaatatgacagaatatgggggagaaaaagaaataacagcaaacaaaaaaatgagcaagtaagtcaacagataaaataattacaaaccttaaaataacttaagaggaagaattcatctaattttgaatattctctaattcagaccggcagtacccagttatgctcaaattgtgactttctgtcctgctttcattacatttcttgttgtactctagttcagaatctgcaacttgggagcctggcattacaatgcctttggcagacatccctaatcaatcctagtattttttttccctacagatccaggagggagacccatactacagctcaaccctattgtttatagagtcatgattaacagatcacagataaaatgctagatgaaatcatgcagcttctctagcacacactgccctgacatgcctcggggcttttgctcgcactagccctcatttcctgctttgtcattgttgtttatcaatcattgagtactttcagtgtttttacatctggaatcccacttaatttttaaaatggaggtgtctaaactgtgccttagaaggctcaagtaacatcccaagatcacacagtgtgtatcaaagcaagactacaaaactcaggtcactggactccaaagctgatggtcttaaaattgttcatcattgcctctctttacagcccagttcaaggggcaccttctctgtgaagcttctcctgaccccttcaagcaaaatttaccacttcttcctttgagtttgccagggcctttgtacatccccattacagcatgacattatactttaatgacttgaatgtagcactctttgagctcctctgtggtaggagccctttttttaaatctctgtatccctggtaactagctgagtgcctaggcaggctcttagtgacacattttggatgcacattaaaatctggctgctggactcattaagattgtgggtctgtttcttagtgcttggccttaacacactaaaaataaggccagatttatacatgatctttaaaaaaataaaaacaccacatgcaatacatatttttgtaatttcaaagccttcctaacatcagttattgaggactcttaagcagaaacctagtcacagggcatttagcctgtaaggacccctgatctctagttcataaacaccctccagtataacgggggtaaaacagatcaaattacctacaccctacttgtgaagtgtcacaccacagatgacaactgtttaaactgtagctcttgtcctataaatgaaactgtggttgggctctctgctgtggcctgagttctgtctgggttgatggtggcacacagtgacgtttccattttgcagaaactcaggaaaactattgagttgcctgacacttatttcacagtatgttatagttttatgcaaatatgactcattatattcaaaagaaaagttatggaatctgtgctatcatatgtgacacgtgagaggctgatcgcccagataggtgtaagtaaagatgtattatatatataaggtgaggatttggggttgaaataatgctctagaaatatcactggacatgagtctcaagagagctgcaacattgtctcagaaggaaagagctagtttcattgtagccttccctggaaaatactagaagcttgttattgacttcgatgtcaatttgcaaaagacagatggagaaagaaggcatgggccttctcatttcatagattagagcgaatccctttgttatgttatcccatcttggacacaaacaggcacccaatcttataagttgacatttaaccttagtactttgacagactaacatacctccccagagaaggcctgtccattgaggaggtgctccgacccttggctgtcctcactcccaaagtgtagtcggatctcctccagccggtggctgtatgtcatgggccctccagatatgttgaccaagtgctccttgtccaggcgaagggatacgtgtcttccagtgttgtacatggtcccactgacctgcaaggcaattagcaacaggtcaagcaaggccctccttcttctatgcctccccaaacccagcatggtgcttggatcaacaccttttgcttcctcttgatgggaagatgggctaaatccacatgtggagtagggcgtggcagctgccccagagggtatatgtgggatctatggtaatttctgtgaggcataaaccacatgatggcttaggaatttgaggtaagaacttgaaggagacttttcatcatttgtgattaatattttgtgcattgtattttataaaaaatgaatttgtccttcttactataaggatttggaatggaaagatactgcaagagttctaaatctcagctgtgagaaattggagaaagcagttagcaaggggtgagatattaagaaggccaaatgagacagggaagagaaaatgagtgactagaagcagacgctcatgggagatggaaagcctaggtctgaattctcaagcgtcctatctggtgtgtcctgccctgcaaccagacattgcacagaatcctcatagcttgtgggcctcaagtggtaaactaaagggattcactcaaacttccaatttcatagattcctagacttactccttattcctgattccatcttgctccagccccttcaaactgctaacatgactgcttggcattccttttccttcttttcttgctgggacttgatgttcagcttcattttcctgactgtgacctcaacaacaattgattctagaacactcattcccatctgaaactctactttcttactctcttgggttgacttagctctgggagtaggatctagagcttagggagactttgaatgagtctggaaggagtgtttctgggttacaggaggctgaactatttggattttcttcctgcttactctgactttgggccaagccttcagccctagtgattcctgaagggcttcctgtaccttctgacaccttcattagatgtggttttcatatatgtgctctatagcactatcttttacctgcctcttttccacctttctgacactggtgttgtgaatgattagctcttgagttgttcactgtggcagagaccataatgctcaccaaatattccagtgactcattttgtttcctgccaccttactgtagaatggagcccatgtgactgataggggccatgggttgggaggggtcatgacaagtgtcacttccaggttgaaatagtggattccccagactcacctttccctggtacatcgaccaatggcattatatggaaatggcaatgtggtgcagcgactgcatggagctcatgtcagcctaggcccctagagattatgtgcagtttacaaaaatgacaggaattcttcccctccctataactacactcccaacaatgtaattttgtaactgctgtcatctagataagaggctatttctctacgtcgagtctgggctggccttgtcacttactttggccaacagcatgtgctgcacacaacatgctagtcctgagagtagaccttgagggcatgcgtgttttcttcacttcttcgtggagccgtgaaactaccatgcaaatgagcctgggctagcctgctggaggatggggccacagtgaggagagccatcccaggagaggccgtctagacgggctactctgtggctgatccactagctgactggcccagctgagatcagcttagcctggcccaggtcagaaatgtccactgacccataggcttggagctaaatgattatttaagtctctaaattttggggtggtttgttatgcagcaaaagggaactgatagacactaagtcagtcatcttctttctcctgtgaaatctggaactatcaacagaaactctccgttgagttcctgaactgcaaggtcgcctgagtgccaaccatactgttaagcagagaaagtcagatcagagagagaggactgaggcagatgtcccaacattgacagaggagaccacacactggggaacgggggagggaatggggagaataactacttcgcttcagatatctttgtgtctcttcgttctagttccttcaagaggcctgaactgtactttctaatattctacaccttaccaatacatttttaaacctcaagttatctattccttgcaaccaaatgatccatgccaatgacttcactcctgttctccagcctcaaataaatgtatatttagttagtgtgagataatcagaacttttcatttcccataacttccttttcagtacaatagctcaagacagatttgtgttagacgtgacttccatctctaaatataacctattttttctaattattaagataatacataggcattattatatggttcgaaagatatgggacagcaaatcgaccacaatttcacaattaaacaggaatcaccactaatattttggcatatatataattttcacactcatacttatagacccataatttaatgagattttatatatgtgcattataaatatataatatagacttttcacttgcatatatgtatattatatatgactttttatgttattctaacatatagatatttccatgtcattaactattctttagcaatatcactttgaaatatctacatcatatttccttgtaaaaatgtttagctgattgttgaatctttacagccctttcactttttcattattgtaaaaaaaatctgtaataaacatcctcatggataaatcttttcacgaatccagagatatttcattatgcaaattccaggtcaaatagtgtacacattattacagcatttactatgtattgctgcatccatctgctatggggagtagatcccacagagcagggctggatctctgtaattcccttcaaatgacattaagcacagaaccatgggattcaatctagtgacattctgtggtataaaaggcaacaaaaaacattgctccaagttcctatgacatgcatgctttgtgccattgggcaagtatcttgggcttcctaacacttctagaaatcctttcatctatgtctgtctaatgttctcaagaaaattattgcccattgaatcaaggcactgactacattttatgcttgtgtgaattttcccagtacttgggaaacacactggcacaagtaggtggaaaaatcaggggccctggagtcaaaagattctcagtctgcctcttgcgacctagggtagtttactgaatttcttgaagcttcagttttcttaaccatagaggtaacagaatttcctccatgaaaatggcagacaaaaaagctataaggcatattgaaacaaatagcaaaatgacaaagtcccttcttatcagtaattactttaaatgtaaatggattccacttgtatgctatatctaaagtagccaaaatcatagaaacagaaagtagaatcgtgattgccagggactgagggagggaggaagagagagttagtatttaatgagtataaagtttcagttttgcaaaataaaaagagttctggaaacagatggtggtgatggttgtacaacaatatgaatgtacttaacaccattgaattgtacacttaaaatggttaagatggtaaattgtatgtcatatgtattttacaacaataaaaagttggtaaaaattgccctcacgaggttgtgataattaactaatatatgtgatggtcacacgtgttcattctcttccttcccttactcttggctattatggcatgggtgcctaggtgatattgaaggattctcgttgatctttcttccccatgtcttccccaattcccagagcctggtggaatataatgttgcttgctaaatgtcataatgaagaactggagctaacttctgccttgtgatgattcactggcctctcattttggattttaaggtgctagacatgaggagaatgcaagatcatattgaaggccatgaagcaaaccccaaaccagaagcaggaatacaccaatgtgccttctagttcttcgatctcacttccagaccccttctgcatacatggctctgtcttcattcattcattcgcttggccatttactcagaacaaaacattcaatgcacctaacagtgtgctaggagctggggacagtatgactttgaacaaagccagtccctctccctgccatcatggagctcacactccattatggagagacctgaatgggggcacaaagttatgggcaatccataactgctatcattttcctatgtgttcttacaacgagatgcaacacccccttttccccactcttcccatagataccgaaataacattaatttgtattaatcaaaaaaagctgtgtagccagggcatggtttgttgcactttaatttaaaaataaaggcttgacaacgttatgtatgatatctgagggtacatctgcaccgcagtaattaacattgcagcagtgccattttatctcgaatgctaattactgtgttttcaatgaactatttgggtgcgcagcatgttggaaaaagttatattatacagaccaggaaacaaaacagaatggagaagttgaagctgcaggggatatccaggttgcctctggctgcctcacagttctttttgttttaccttaattcactgcaaaataaggtgtgagatgggtgtgatgtccattttaccagcaaaggaagtaagcgggggctggtgaaggttcagtaacttatccagaatcacacagtggcaggtggcaaacccaggtcttctgattccaagactaatgatctcgatgtaagcaaatgcaagtgtccttgctcatttcagattaaaaaaaaatactttggggggccaggtactttggctcatgcctgtaatcctaacattttgggaggtcgaggcaggcggatcacctgaggtcaggggcttgagaccagcctggccaacatggcgaaaccccgtctctactaaaaatacaattagcggggtgtggtagcaggcacctgcagctactcggaaggctgaggcaggagaatcacttgaacccaggaggcagaggttgcagtggctgagatcgcgccactgcactgcagcctgggtgacagagtgagactgcatctcaaaaataaataaataaataaataaaataaaaaacaagtaaataaaaaatatgttggggattttcatttcttctccagtctctatttgcagatcttaggcagttccagaaaaagtgggatctttttcaggaaaagagaggactataattggatgctagcctgctgaagttcatcccaggaggaggcttcgagaaacctgaaggtcaaggaagtccctcaatttcctcacctgcggaattcatactggtttgagactggttggagctacgtatattgagggaagcaggtaataggtgctccacagatgtgcctgtccaggttgtatgtcaatcaatattatcttgataacttgagaccatctagaagcactatgttcttttgcaaagcaaaaattgtatgcctggtgtatttattttgcaaaattagatgtctttgcatagcaaacacagtgctttgcagcagtcagtgatttggggcctctaataaatggggtcatcttttttcattctggtgacactatcatgtttagagggaaataaatttggtcaatgcatttttaaggtaggaaaaattttcattctttgaaattcagccacaatcctgttcataaagatggcatcttggttagaactttactgggtgccacagggggtggcggtaaattctgaacctgaattttctctgttaatcatcacaatttctccctcaccaaacccagcaccatttgcttattctcagtgggaagatattaggctaaacccatatgtggagggaaggcctcccacagggcatacctgtcttacctggtttctatggcactttccatagaagcaaactgccatcagtcgggggccagaacttgacctcagctatctttggctctaaagcctgtgcttttaaccactggaaattattaggttgtgcagtttttgtttctgttttttgatacggagtctcactctgtcgcccaggctggagtgcagtggcgtgatcttggctcactgcaacctccacctcccgggttcaagtgattctccctccacagcctcccaagtagctgggattacaggtacctgccatcacgcccagctaatttttatatttttagtagagacggggtttcaccatgttggccaggctggtctcgaactcctgacctcaggtgatccacctgcctcggcctcccaaagtgctgggattacaggcatgagtcaccactcccagccacagctggttatttaacaatgtaatattacagcattttcttcaagaggtgggttgagagtgtaggagcctcacagtagtttggagctcaggatgtttaggattacttactgtttactcagggttctctagagaaacagaatagtgtgtgtgtgtgtgtgtgtgtgtgtgtgtgtgtgtacatatatatgtataaagacgggtaaaataaagagacaacacatgcgcacacacacatacatactactgtgtgtgtgtgatatatatatatatatatatatatatatatatatatatatatatatatcacgtaaaataaagagattttaagaaattgtctcatctaattatggacattggcaagtccaaaagcctgcaggctggaggcaagagctgatgctgtagtttacctctgaaggtaccctgcagaattccttttcattcagggaggtcagtctttttgatctcttgaggccttccactgattggatgaggcccatcaaccttatgcagggcaatctgctttactcaaattccactgatttaaatgtttatctcatccatagacattctcacagaaatatcccaattaatgtttgaccaaatatttgagtgccatggcccagccaagttaacacatcaattaaccactacacttattttcaaattctatttgccttctttattacatcagttcaaatagctcttaaccaaatagttgttctgataccacacataaagggttatatatataatacaaatatgcgtgtgtgtatatatacatgcatatattatatagctacattatctatatctgtatatattatatatacacatatgtatattatatatgatacaaacacatatgcattttatctatatatttcctacatcacataattttaaaagtcagctacacaaagactgttttccaaatgtcagtcacatagaaggagaaccagtttgaaaagatgtacatctgaatgatagaacaattataaagaaataatttaacttttcttgttaaagaacaaggcaggtttatccttgagtatagatgggaccatggagattattttgatgtaaatcccctattgttttgggtcttagatgttgtataaactcatattttgagataacaaagaggaagaggtatatctttttataaagaccaattcacaaaatacacatgtcaaaggtcttttggtttaatggagatagcgcttgtagggtggatgtttactgcagaaagctaagctagaggaaatcttaccttcagaaattccaaaagattcaataagtagctacttgcttgatgtgacacaaagattatgtgaggtttccgatatgttctctctcaaggcagtctgactcagatctcctctaatatagtaaaaaataattctctacagcttaaatggaaatataacactaaaaatggagtagctgagaggaaatagaatttcagtcatgcagaaggaagagatggcctatctgacgtgtacaggagctacttgcattcttaacccagttagttaggaaaggaagggtggaggacacctactaattggaggatttactatgtgtcagatgttgtaccactttttagattagaaaaccaggtacaggtcggctaagaattctactcaaagatacaaaaggaataagtgaggggactagaattcaagtcttcatgacccaagctcatgctcttcccagggtctcaaggagtagcttcaaagtcactgtagagagggtgcactcccatttctcagtgaccatgtacatttcagaaatttcataatgtcctttttatttatttactattctatatggaattggcacctgggccctgttcactggtaacatagaagagccggcattcttgcctttgagatttgggatacagtcttcttcagcagattttttttttttttaaccaacaagaatgagcttgaatcaacagattttcttttactataactataaaaatacataactataaacacgctgggagctgatagaccacaacatccacaacagcggcttgactgtggtgtactctgggctgtgtactcagtccctttccatcatcatctcatttcacccttatgctgcccaggtgaggaaggcattatccatattctgcatatgaggagacagaagctcaaaggggttaaaggatttttacttaaagcaccacagttagaaattggcagtcccagaattctagcccaggcctatttgactgcacattctatagctctttaaaagagaagaagtcagaagttggtaggaagagtgctgagtgctggggaaatgaggtagttgtttttttttttttttttgagtctttgctctgtcgcccaggatggagtgcagtggcgccatctcggctcactgctgcaagctccgcctcccgggttcacgccattctcctgcttcagcctccggagtagctgggactacaggcgcccgccaccatgcctggctaactttttttttttgtattttttagtagagacggggtttcaccgtgttagccaggatggtcttgatttcctgacctcatgatccgcccgtcttggcctcccaaagtgttgggattacaggtgtgagccactgtgcccagccatgagatgaggtagtttttaaaaagcttctggggttagggatcaattcttaattaaaatatgatgtctgcatggatatgccaggttgggtttaatgtatccagacctggtctagacccagggtggcagggcagttccagtccccgcttgctgggagttgagagatgggtcatacctgcctctcctagtgttggctgagcaactgggtggctgagcccaaaatgttgggaggccactcagtgaagaagattcaacggccgtgtcatgaattaggtgacctttctttgcaaccgaagtttcctgttatatgtctctggccactctgctgaggtgtgtaataggctttctttgcaatgtaattagtgagtctgagatttaagaacaccacttagtctagttttctgcaaagtagctcaagagatcaaagggctgatttgtaaagagtgaatacaaaaagccagtgtgctgcctgctcacatgggcactctggaagcatcgacgcaagaaaaaaaaattagtaccaaaaactggagtcaaatcattggcttcagtgcagcatagcagacacacagattagcaaacttaggggcgtatggattctaaagctaaaggacttcagagatcatcaagctcttattcaataaaccaggaaactgagacacagagtggttgagtgagttgtccaggattatgcaaacaagtagcaaacccaagattagaaatcaacccactgagtgtttcttgctttatgtagcactcttccccctcctcttattctcttgcttttcctttaaattatcttatgctgagggtacctaagaatactgactcaaagttagaaatgctagagtactataataagtgtgtgtatacacaactaccatagcctatagaaaaacagaaacaattcaagttgacatctggacctgccatttacatgacatgtatctagatactgggctcttctcactgtttgtccagatgttttatgctatgtagctttcatagtattgattagaaatggaaaagattagaggctagataagagcatggtggcagagggtgtggagctttaggagtaggccttttttttttcttttgcaatgcatctttgaaagaaagcagaagggaaatatttggagctcgtaggctggggctgttaggaaaagagtggcttagatgtaggtaaataagaaaatggaaccagactggagcgatctgcttcgagttaccattggtgggattgggtaggagagttgatgtacttctgagatctcacccactactcttaaccctgcagggaaaatagtgggtttttttcccttagtaatgctaagtttacgctgatctttctcttacctatccatctgagtcagcctgtgtttcctctgtaaaaaggataggattttggcatctacactgaaaaactagatgaaatgatcacatgcactgcttattatattaaatcatattattattaaaagcattgaatctgtttttgataatattgactcttcaaataatacatgatttatttgcacactctgcagggatgctaggtagcaccattgcagtgaagcatctcttcaacttgattgatcttggtaatgacaaaagacacagagaacaggtgtgaaagatattgcttggttcactaaggcgtgggctaaatcaagagaatgctccctttcctccatccaacccaaggataccatgggctcatggctggcattaggctgaacatgttcttgccacacgtagtcattggcgctgaagcccttcacctatttcaggctgcccagcctctgaccaggaaggcacacttcagagagtggtatctggaatgagtttttccctcacaatcctggtatgtaggtttccggggggtgagtcccatgtatttctttcctactgaaccaccactgccaaccaatggttttattagtttaatattgttattttaataatttagtattataaacaaaatttaaatttgttaatttgtcttctgtgtctgcttagctgccttatgaacattaaaaatcctgacacaaaaccttcgaggtcagcatgagcttcccattttccagtaagagggtggtgccacatgctcagctcatatggccagtgggttcaagagccagactgtgaatgcaagactgtccgatttcaaagtcaatctccttatgcttcactgtgcttctcttaagtgtcaacaagcaggcctaatccgtatgaccccagttcagtgtgggtttctggtttagttctccaattcctttacctgggttaaaattcggctttaaaccttagcccactagcatgtggagagcctggagagttcttgtcaagcccctcattgttggttgtctggatcaatttttttttcttacttcttagtgagtggctggagtcttatgccaactggataaagttattggaaccaagatggtaccagctgattgattagcagtatgcccccaatggaattgcctgtgctgctgctcctttcatgagttgggggctcaccttggctatctatgccagccgaaatcaagattgggttgagtacacttctttgctctgtgtgtgtgtgtgtgtgtgtgtgtgtgtgtgcttaaaatatattttaatatatcaaatatatttaatatatgtaaatatgtaatatataaaatatttaatattttattatatataataatctatatttaatatatttattttttttggtaaggataatataggcatgattggatgtctatttaccagtcttgattcctgccatatctcagcacctgaacaatgtttggtttccatttgttggatgaaaatggataaggttttgctttgagcatcatctgggtacctggtccaagctccaccccccattctgcctcagtaggtctgaggtgggactcaggaatctgatgtcttcctctcctgagcttcctttgatgttcatttgagctgagtctgacagttcttcagtgcagtggggaaggggtacagtaatatagagtgactttttttttatcctttctccatcctcccttcgtgccttaaggaattgctttgataattataaagatatagcactaaagctctttctaaatatatgtagtgggttatacattgattcatcttcaggccactgtttttccctaaactacgaaaattcaaggttaggctgctttaattaacatactaaaacttgccttagaaagcttatttctagtttaatgtcatttaattcaatccctgattcacagggcttcaggcaaataactcccgatctccagttattttatctccaaagaggaaaatgccttttaaggggtgcctgtggaacacagtggcacacaggacactggcagggtccatagatccttcttaacattccccgtgtggtcatcactggtcagatgtcagaatccttgatgccagtttttcaaagtagaaatagcaaatgtttgggggataattagatagtaagtctttgctcattcgtcatttcattgtatgcaagttaagtatgtaacatttatttcccatggtgtccttgcccctataggctctctctcactatgactgctgtgctctaggacacactgaagacagccacagtggtcagcagacagggtaaatcagtgagacaggccaggtgtgtgacagcagggagcggtggagatggtggcggtatggaggagcatcatctctcatctcttggatgtctttggggcagtattcaggacactgggagatggcctctggaggaggaacagagagaaatgcaggaaaaggaggggatgggatgcgagacttacttttcattttgtgctctttcatattgtttgaattttaaaaataaacagaatcatttttaaaatgaaatgaaagactctgtagacaatcacatctgatggtataacctgggatgtgtgctacaagagtcctgtccaatacagcagctatccaaaagaaacagaaggcaagctacatctgtaatttttaaattttctagtagccacattaatgaaacaaaacagtgagattaacattaggagtttatttcatgtaacccaatatatccaaaatattatttcaacatgtaatcgatataataattatgaatgaggtgttttatattcatttttcataaatcttggaaatttaatatgtattttatactcaaaacacattacaattcgaactcaccacatttcaatcgcggcatgtggctagtggctgccatactggaagtgcagcctggtcgggtcagtcttccttcccaagctgccctcccttatgcgaacacagctatattaaggagtggccggctgggcagctgctgaggataccaggctctgaggaggcttaaacactccatgaataaattaggcatctaatgccagtaacttatatttgtttcctacccccaaaacagacagatagccctctatctgttgaggtttttttctttttgagtgtgtgattcatattgcaagttttatgggccaaccaccctgggagcagccaagtgacagttgcctgggttggcagttagaatctattgatgttgaaactcagtagtgcatagcttagtgctatttactaggaatacataatgtgtcccattatctaaattataaacctcttaatatctctcctaagaatttggttgaatctgaaaatcatttaaaaaaactgaaaagataaatgacataaaagtgggaaaccttttgttcacaggtatatttgttgggagatgatggaagaattcccaggggctttcatttcactgcttcttcctcctcccaagattacctaatccttgctcccatcttgaaggtcaatcatttattctattcatcaaagctcctagttttgtcagttaatgactatgcatttggtatttcacattgctgtccagttttcaagtatttgcatttctcagtggctctgcaagtgtaatgaacatttgctgtgccgtggaagcaaggcgtagggtcctaaactgatatatagacatcatccacaaccaaaatccaaacaggtctctacccttcaggcacttattattggatttaccactgatgctatttacaactgaagcccttaacaagtgaggtgtgaccatagaaaaagacaccagtttctagaaactgcatgcatcctttctagaagcaagcaaccaaggagactgcattttctaactagagatcatatctagatatactaataataataatccatcaatatcactaccatctacagagctctatatggctgcaactatgcatgcattagcaacttgatccttgccactacctcatgaagtggatatttttattatcaccatttgatgaagaaactgaggctcagtgagggtaaataggccacagatctgtaagtgtaatagataatacatgtgaaagagcccatgcctggtgagctgctgtattggctgtaaggaggagagatgatttttgtccatgggtactggggcatttcctggaggagtaggcatttgaaatgggtgttggagcatgggttattggctctaaggaggagagatgatttgtgtccaggggtacaacaggcatttcccagaggagtgggcatttgaaatgtgtctttgagcacgggtaggatgtaggcatctggagatgcctagaatagggaataaaatcagtgaagacttgggaatgggcaaatataaggcacacaaagggagtggcaattgtcatgagtccagtgttcccagagtgattggaacaggagcagctgcggggaggggtttgcacagaagatcggtgacagtaggtgccaaacacccactgtgtgacagattctttgctagggcttcacatagttctattatttactttccaccaaaatctgtatggtaggaagtattactatctctgagtcacaaataaggaacaccagactctgaggggttaaataacttgctcaggtcatacactagcaagaaaaggagggagaatttgaatgcacatctgtccaaccctttccactgcaaaatgaaacaaatcatgttttaaaaagacacttttccgaggaaataatgtcctgcttttatgctctgccctgtgacaccaattctccagagttgctacatttctatatcgaggcaagcccccactcttggtgcctcctctgtgatgtgcatccccacctccactcccaccgcacctctttcaatggtcttctccctcttgcctggtctttgcctaataggaataaaacataaaaatcaaaacccaagaaaagcccaatgtcatgattatcaagtagctcacagcaccagctaggattttaccttaggggtgagaagatttatattgcaataatcaatatctcagaaatatgtggctcactttctgcaactgacattccatttcatggcttcaaagcaatggttacatcagccagtttgcgtctttaatatagtgaaatgcctactgagggaagtcggtggagcatgtgctgtgggggtggggagtctttattgccatctaatgaccctaaaatcagctctctggttatccagcacgggaaagcaaatggaaccttccatctcatccatgacaaaagtattgagtggttctgaagttatttgtacaattgatccagctaatatcaggaaagcatgttcaccagatgaattagagacaattaaatgcaattctgtgctcctgttttctatacacagaagacaatcataaacccagagggtccaaatgaaatcatctgacccattttaacaccctttccgtcccacattcaccattctagtccactgaaaagcctctcagatttccactcgatgaggtgatttcatggtgcatttctgctatgcaatccccctacctcttttactgtcaatgaacttaaatgctcacagcaaaacttattttcatgagttcctttcagttgcttatatacacacacacacttagcagagtaacctttccttcttctccttcttcacctctgacatacactcattcaacaatttaaagaaattccacctcctaaaaaccctctgtaatctgcccattctctctgtctctgctaatgtatcttattctatccctcatcttattctgacccctcctctctgtcccccagacatggcccaacttaagcccttattttaccatatttcctgaaatatgccataggttgtgaaatatatcctgattttatgaaccaccatgaaagtaaaaaaaaaaaaactctacaaataaaataaaataaaataaaatatgccattgtttgtaggaggcctcctaaagagatgttgaaacatgaaaaaaatgtgcatcttaaatggatgatacacagtatctctatgaaactcttatcattgtctcctgactgctcatgccaacaatcttgtagtggcacaacaggcccttcacaatcaggctctgagctgcatctccttttcctaggcttgcaaagccccttctcatttgtcaagaccacctcctcaaagtcctttgaaaccccacaggcttggtgatgatgcttccctgagttcctatgacttccttaacttaagcgtaataacacataaacatagctttgtaattatctgcccccatgtcccactatgagaaatccttggagaaaaggctatgtgtctccttcacctccatatccccagtccctgacacaggacagggcaggtcctccttgaattgctgaatgcaatggactgtgtgatacatgtagcttctgaacctagtcactagagggcagtgtggaaccatcccattgcccacaactgcggttccccaagaatctaggttgcagaggttgtaggaagctggcctatggctgagagcctaggaggctacatgactccaagggcccagtaccattctgcagaatcgaccctgaggatgctcctagcatctccgtatttcttgccagcctgcccactaggtgctttcaagtggctgcctcagcacatttcttgattaagaaccaaatgctcttcctagctctccacctatagggatgggggcagaggccacagagagggaaataaacgtctccttaacatccccattctcatttctaataaaggcaggcttactgtgaagggcctgcaatataactgctccactttgaagaacaacaggtagcagcatcaatatttgatttttaaaaggttgtgtgaacagttttaaatattaaagataaaggcaaagacttagatcatctttttatctcagcagttgaagattttaaatgaaaaatggtgctaatgagcagaataagactgttcacccatcaaatggtatctggttgcaataaagcaaaatcattttggggttggggggagaaggggtgggaagcaatatctgtaccagagaagttttctgttcattatctctgtaatgagagaaaaataaagccactctgctggagtaactttcttctatctcatcgtgggctgtttagctccctcaatgagtggtctgggacaggctccgagaaacctcataaattaactatccaacttcctggctaatgagcccaatatgtcaatttctagtgatcaaaatgatgcaattcaatacagcacagttcattttgtaaggaaatatactcttaatagagagaactgcagggtcaccgtcttcccaagataattatgggccagagaattagaggcgtggagctgtacttactgtctggagatatcccatggggtttgtgtggcagatattgtctttcagggacaataaattccttcattatatttccattactgcattaatgcagcgatctccattttagttgtaaccaagaaggctggttattcctgaaacttggcatttaatgctaatgagagcttgcaaggcaggcagctccctgtgtgtgtgtgtgtgtgtgtgtgtgtgtgtgtatgtgtgtgtgcatgcatgtgtttagggggggttgggtatagacaatccagcagaaatgtcaagaactagaaggtaccagggagagtctggagggctgagatggctctgaccagacagacagatggatatctggaagagtcaggggtaagtagtctgagagccaagagtaaattacagctgaagagagaagctgagatcactacgaggtaagcagtgccaagtgtgaaatccagcctgagaaagcaggtggtcctgaaggtgaaacaaacagatgcaattcaaaaacaggaatgccgggcagcaaaagggttcaggaatgctcggaagtaagcaatggtgctgtaaactcatcctaattcagggttgcctacgaggtatgagaaaaaaccaggcacttggtggtggagccaaaggcagccctagccaatgatatctctttaaaaggctccagctcaaggtagaccctctaagagcaaggactccatgttcaggcttgctggaattgcttgattctataatctgcaccccaaaataaggtacttatttggttttaaagttagaagtggatgaaaatgaattccacaagtctccatgtgagagctgatgaagctccagcatgctatctaaccatgctggaaggctctgatctggcagggagaaccaggtgggaaatactggtttcactagcatttttcaacttgattccagtggagtggacaggcaacatagtaggagaaaggacagctcctggggtcaggttcaagttctggctcctttgctcttagcttcatggtgttgggcaggttgcttaacttctctgagctgtggtttccttagctgacatttaatttgctgggcaatctatctatttgcagggaagtggggagataaatgaatatgtcagtttgcttatttttgcttatttttatttctccaacaccaaagataagaaaaaataagttataaacagaatcaggattctttcccttgaagcaattcttatctaaaatggactttagtcaggaaagtaaggttgctgttaactcaagtaacttgggaaaataattgtgaaaagaaaaattttccatgaatcagagagctcaaaattataatatgttaattaggaagtgtttacttaaggtgagaagtggattgtgctaagttcaacatcctgccagaggtcctcgataggcaatgactggcaatgcccgttagcttgctccatccttgcaataaaactcattgtccagaagtcttgggaggtgccttggtagagatcagttgctatttaaaaaatctctaactgttgacttttaccttgtcttggccattgactaaatccaactattgtgcactgagtgtttactaactgcaagttcattttaaatgttctctcatttgatctttataataattgcatgaggaggatttaattatgcctgtatttagagatgagaaaactgaggctcagggagtttagcttaatcacatggttagctactaatagaagaagaggggagtttcacactcatacttcattcatcattaggtggatttcatatctcacattatttttagtactcatcctcagtgactctggctttgagcctcttaaatttgtaaaacaaacttgatattttggaataatttcagtaggtctgcagaaaagttgcaaagatagtacacagatttccatatatccctcacccagcttcccctaatgttgacatcttatgtaatcattgtacatttgttacaactaataaggtaatattgtttcaccactatcaactaaaccagtgatcccccacctttttggcatcagggactggttttgtggaagactatttttctagggatctaggggtggggggacagctttgggatgatcgaagcacattacatttattgtgcactttatttctattattattacattgtaacatataatgaaacaattacacaactcatcataatgtaaaagcagtgggagccccgagctttttttttttgcaactagatggtcccatctgggggtgatgggagacagtgacagatcatcagtcattagattctcataaggtggacacaactcaaatctctcacatgcttagttaataatagggttcatgctcttaagagaatctaatgctgccactgatctgacaggaggtagagctcaggcagtaatgtgagcattggggagtggtccatggcctgggggttggggagcgctgaactaaactacagactttatttggatcttaccagttttttcacttatgtctggtttctattccagaatccaagccgggatactacattgcatttagtgactctcagttttaacctgattatttgccacaatttccttcgggaaaagttcggggtagggataaaggctaacattttttgtagcctggatccacataaagatgtgctttttttttttttttcttgtttatcttttattttgcttctggtagcagcagttcttaaaactcatggcacacgacactttcattttggcctgggatcttggcctgcttgtacaatagctgcaaaggtttgggattgagattcagctttcaaaagcgactctccatcactgtcttctttcaaggacaggaaatttcaaatcaactttgggctttaccattcagtgtgccaaacattcctgaagtttctacgattgccaataaataagacattccatcatctttaagacatcaaatcttctgataaattgaatttcataaaatattgctctattgatcttagtgctcaactttcaataaggcaagccagcaagagttgctggctggtactttttctgcaatgaggatgtcatctgcttacatggggagagacatttatgaggccagggttcctgactttaaatttcagttcctggcactatatcaagtccacagtgatgacagttaccttctctccattgctgctgctttaactttatagaaaactttgcttatgcttattaaacaatgtggcacaaaccctgtgaggctacactgcaagtcatgtaagctagtacttggcacatagtgggtatgtgatctctgttaaagctctctttccagctaggacaaaggaaaatcaaacttgtctcaaaactcaattttgagagttcatctcgttttcagaaaggaaagggccaatgatgaaaactgatgacatggcaagactgagaagaaaaaaacacagtatttcttctccacacggtttttccagggctgctcttgaaattgtctgcaatgatgtgcatgtattttttttaattttaaaaacaaataacatttttatacttttataatgacaacatgtcttgaatgccatctgttcttgccatttgttaaggcaactcaatgagaaaacagcattcggatgactaatatttagcctgctcatagtttttaaaatggatggacagattcccttgagattacaccccaggatccatggcaagctggtggggtgggagagctgaaggtggagtttttgccactactgggcacactgggtcactcacccagcatttcttaagcaatcacaaggtgccaggcagtgtgctagaactagaaatataatacaaagataaaagagagactcatctctcttgtggggactgaggagtaaatacacaattctgtacaaaatggtaagtgctaagacagaggtttgcaaagggacgtagtgaaatatgtagaggaagttaatgactcacaccgtgtgtgtgtatttgggggtgatggggagtgggttaaagggtactcagaaacatttctgggaaggaaataaaaccctgacatcagtctagcagaattggtagacatcagctatatgtaaaagggggtggattcaggctcacataaatcctatgagaccagcacagtgcatcaaagatatatttccagtcatccttctgtttgaactagaccagagaaaaagtgtattcaatatagctagtgagttaaacactacttcctgggcactcaccagtgcatcctaaaacggttgatcaacatgaattgattgttcagccccagaccaggtaaagaggggatataagagaagccaacgtggttgatgatgggagggcagccgcaattcagccacaggcaatgatcaaatagcaatgtggggcagtgtgtaaatatgggggtccatttatgctcaagaaatgggtgcatcctctgttactctgaggccataaagttgctactctgagtcttttttaggccagttgctggaggatctggtgtagaaaggctagacaggaaggagatctaggaggcttcctcccaaatctaagattctatatctctgttgctcttttataggactgaggttaaaccttttaaaaatagcctctgtagttttttttttttccctagagctatttgggtgtgcctgtctgtttttaattcataagaatgcacagtagctgcacattgtaaaatgcattcctgacaccctccccgccccgcccagaaataaaaagctttccaggcatgacttctacgttattctctaaatcatagttatctgtggtgaccagcaagttaccaaatatggctataatatcctatgttttctccatatgctatggagaaacaaagaacccctaaacaatgaaaactaaggagacacaaaccctcccccgagaccctaggcttggaggggcacgaaataataccaccattaatactaatatttgctaaactgtattgtgcaaatttgctcaactgtttcctctgtttcctatgtgcaagaccctgtgctgagcacagtatctcactgagtcatcacagtaatcctgtgagctggtactgattgtattaggctgttcttgcattgctatacacaaatacctgaggctgggtaatttataaagaaaagaggtttagttggctcatggttctgcagcttgcagaggaagtgtagcactgtcatcagcttggattctggggaggcctcagggggcctttattcatggtggagggcaaagagggagcaggcatctcacatggccaagtgggagcaagagagagatagtggtgggggaggtgccacacacttttacaaagaccagatctcagccgggcgcagtggctcacgcctgtattcacagcactttgggaggctgaggcaggcagatcacgaggtcaagagatcgagaccatcctggccaacatggtgaaaccccatctctactaaaaatacaaaaattagcctggcgtggtggtgcatgtctgtagtcccagctactcaggaggctgaggcaggagaatcgcttgaacccaggaagcggaggttgcagtgagctgagatcgtaccactgctctccagtctggcgacagagtaagactccgtctcaaaaaaaaaaaaaaaaaaaaaaaaaagaccagatctcctgtgaacccagagtgagagctcactcttcaccaagccattcatgagggatccacccctatgatccaaacacctcccactaggctccatctccaatactggagattatatttcaacgtgagatttggactgggacaaatatccaaactatatcactaatgttacacttgttttatagatgtgaaaaggtgctccttataatggaggatgattgacctgtccaaaatcacagagcaagatggtgataaaatcaggtcaccaagccaggcttgcccagtgctaagacttctccctattatatcacctcccagaattaagacaatggagttttcccatgccacacccagcattgcctactctctgtaatggctatgttgggtctggagactccgattttccatgaaactcagtagtcatacacttggaaatctcaagttctgcctttcccccttttggcatgggtggctgtcccactatgtctcagccttgccacttcttcctaaatctgagaaagtgaatgttagccagccctgactctttcctgttgacttagcaagcactgattgaacttgtacttggaacaatggtttcctaggttctgagtggcagaatggggcaggaggggaggagaccagtgaggcgaggcttgaccaataccaagctggctaacatcaatatggctctttaccattttacagagagtgttcacacactcattctcctatggttcccacacaggaatctctgaagtaggagcaggcatcccatctcacaggtgaggacaaagcctctcacagagtgtatgtgcctcatctgtggccacgtgctctgcagaatcagggttcaattaccatccctgtgatgcctcgtggagtgctctgcattgctgctggaatcctatgtctcctcctacttactttcctctatttcattctcatacatagctgaacctctctgtgcctcactttcctcatctgtatatggggagaacaatagtggctactgttttgttgtgaagattaaataaggtaatacatgtaaagatagttgaaagagtacataacacataataattacttaacaaacattaggtactcatagttactattaacaattactagtattaccattactgctgatactatgatgcacacacaagtaacaattataaagatatatgcaaataaatgcaaatgagtatatgcacttgcttattattttacaatgaaagtgctgaatgatacgaagcaaaaaaaagtgatataaaataagatttcctaaacttggctgtttttgatatatatatatccctaacatttcatgtttcagtaattaaggccatgaagagaactaaaatattgactaaatcctggaggaatttccaaatgggaatgatggaaagacagacacagagacaggccagccaccacagccaccaggttaaaatgagggaaggcctacaattgccatgggaacagagaagacaaggagagggaaaagagagaagcatttttttttttttgaactaggccagctaacacagttatgtaacttaattgtcataactgtcatgtgagatacatggtattagcctcattttacaaatgtggaaattgagactcaagttcaagtaccttgttgaagtcacaaaatgaaatggaattttaacagacttttactctaaaacccatgctttctctacctctctaccaccaacagaagcttctggggagcacctcgggagacagccttttgatgtctcccttctctgggctcttagagcacttagcatctctgtaattcatgcacacaacactcacacacagcatgcattgctttatgtgcacaccagcaagtgatccctaccaccaggccataagctccttcaagacagagtcagcatcttagttgcttttctatttcctacctgactaacatattgacttgtacatggtaagtatctgttgagtaacctagtagagaagagagattctatgatataaaagactgaggagaatgcaaaagctttcataatcaaaggttgctcagtgtgtagaacattctggaagccaggttggagtgatacattcccaaccctggttatagaggactgactcaagtatggatcctttactgcagctgagctgctcagataattgtctttcttatttgggactaggactagggagattacatctggggtagtctcttagagacaggggatgtaaactgaggctttgtgggctagtcatctcctgtctgagaagcagagagaaggatgaagtagacattcagtaggaagacaccctcagagcctggtggagaagttgctagatttctgcaggattatcatcatggaaaggatctcactgggcctttgaagccagattgctcaggtctaaatcttggttctgctccttataatcagtgtgaccacgggaaaactgtttaaccagcccatgcctcagtttacccctctgtgaaataaagatgagaataccttcctcagggtgccatgtcatgtgcttcagcacagtgctggatgcataatacaacttcgatgaactgtagctatcattttaatgttgggcctccatttgattcttttgtgctttccatctgaatgtttcaggcatcttgtatactttttccttcctgctttcagaactctcagaagtccaattgctacttgcaacacaaagcaaatcaagttggctcggttgctggtagacagacctgtctcttcggtggtttctgcctgagcatatttatcagctactagccagaaacacacacctgtattattataagtggcaccccaggtcccagcacatttcaaagcacagactcttctctccttctaaggagaagggcctctgcttctttgttctctttgattctcagggcttcttattaatttggtatagggctggggatattaatgtcctcttgttgtcaagaacattctccaaagtcatgaataatcacgttgtcatgcctgtgtgacttaaaatacaaaaggtgcaatttatgcaagttttaaagttactttttcaaaagagttcaacccatgaagctgtcaggctgtcagaatgtaagcaccaaactagaaccttagcacttacttatgaattttcaaaggactttagcacatttttaattagcttctccccctgcccgcaagcctgcaaaacaatctgtttggctattatattctgtgagtggggtagcaatataatgctagattggtgggaggggtgagtggaaaccttgcttcatttaaggtcttttttttttttgaggtggagtctcgctctgttgcccaaggtggagtgcagcggtgcgatctcagctcactgcaacctccacttcccaggttcaagcaattctcctgcctcagcctccctagtagctgggactacaggcgcacaccaccacatccggctaatttttttttgtatttttagtagagacggggtttcaccgtgttgcctaggctggtctcgaactcctgagatcagggaatccacctgccttggcctcctgaagtactgggattacaggcgtgagctactgtgcccagcccactcaaggtcatcttctaggcttcaaggccatgggccagaaaccagttttttcaagtaatttttatttttattaaaagatagttgaggaaagaaagcaggatgccagccagccagccaagatacatgcagaggtttttaatacatacatcctatagttacgcaccatttctccaagcacttataagtaccccaattcacctgaccctcccaacagtgccatttattcccctcctcttacagatgggtaagcaggttcccaggccttgggagaccattgttccccatacctcctgactcatgacaagggactgttcccagagaaacacttctggactctctgccccattctcactcctctaaagggggaggggcatacttctgagactggtgacttgagtgaaaggactgggcctgtgaagctcagtgccatgctatctgctctgaaaggcctgctcacagagagggcacagtctggtttactctcttggctgtgctgggacttcagtggtaaagacctgtcctcactgaggtcagcctgatggtttagggtaagtttaatttggggtgatggtgtggacaatgctctcaaattcactttgcagcatatgttagctggatcccctacacagttttcatcatccataaagctaacgttttggctttcacctgactcctgggtctttctcttaatttaagccatgcagggtacaaggggggtgggtagggaatgttatttactatagccatctccaacacaagtaagaatctattgtaaatagcaaagctgttcttttatttattccacacatatttattgtgtatctactatgtgtcagggcccaggttttaaataagagtcctcatcaagtatgtattttagtggtggagaaaggcatttaacaatgaaatgcacaattacatggcaataaggacaaagcaaagaagcgtgggatgctgggagaatgtctaacagggagcacgacatagtcttgtctggaagttgaaggttgttttctctgagcaagtaatatttaaacaggactcagggattagcaggaagaggccaagcagagtatgtatgtggggaagaatgagggatgatctcttcacgtggtacttgggaacctgaagggaggcaggtgtggctgaaacagagaaacagaaggggaatgggacatatggcaagatgcagctggtaaggtaggccaattgtgcaggatcttgtgggtcagattgagaataccctaggtgttttctaaggtctagagaagatcttagaaatgagaagccattgaaagccttaaagcaagagtgagatacactgagatttggctttcacaaaggtcaccctagctgttgtgtaaagaatggattagagctgaggcaggcagatcacctgaggtcaggagtttgataccagcctgaccaacgtggcaaaagcctgtctctactaaaaatacaaaaatttagctgggcatagtggtgcatgagcctgacctggtgtgagtagccccagctactcgggaggctgaggcaggagaatcgcttgaacctgggagatggagattgtagtgggttgagaatgcgccactgcaccccagcctcagcaacgaggtgagactctaagaaaagataaataaatataaaaaataaaattttatagtagccacattaacaaaagaataaaacaggtaaaatcagttttaagaatatagaccatttagctcaatctatcccaaagatgatcatttcaacaggtagtcaaaataaaaattattaatattttacatgcatttttaatacaaagtctccaaaatccagcacatctcaacttgagtaccagattttcttattagtacttgatctgtgtttaaatttcataaaacttgtagttgaaaaaaatattcatacacttaggtcatactaacaaatttgaaagctttccagtaactgaactgagtatctgtttttcaatttaaattagtccacattaagtaaagttaaaatgtcagttgtttgcactagccccatttcaagacctcagtagtcacatgtagctagtacctacacgtattggacaattcagtcctggagaatctcatctgtgtagcggggcgtgggagtcaggtttttcagacaccaagggccaagaaccgttcctggcactccaggcctgcctgcgattgggcagagcagactctcacagccagaggaagccagaggcagttggtagttaggtagccatagaaccctgatgaaaataaaacccaaagggaatagggaagggatgaatccactgcaagagaattcatgttggaaacagtttatagactgaacaaaatgagaggaaaaaagagagagaaatcaaatatgatttgtaggtttctggcttacaattgtgtgaatagtagtagcatttactgcgataggaaggatgggaggaggccttggtttggaaataaggccattggtttgattctggacatttgagtttagagttcctgtgaaagatccaagtggtgatattgagttggctttgagatgggccagctgagagatcaagaaatatttcaggacagtttagagcttgactaataaaaacaacgtatttcacttgtacacagattttctttaaccaaatgcagatcaaaaatacagtatttgagggatataaaacccacatatatggagggccgatttttttgtacaagagttctgctgagcccactacaggacttgagtatgagcagatttggatagacttagaagtcctggaaccaatcccctgtgtatactgagggacaactataaagggaatgatcagatatgtgtatagtcatcttaaatattatagcatagctcccaggctgggcacaagatgaaacaatggccaaattgcagatattaatatttataggccaggcgcaggggttcacgcctgtaatcccagcacttcgggtggactgcttgagcctaagagctcaagaccagcttgggcaacatggcaagatcttgtctttacaaaaagcaaaaatatttagccaggcgtggtggtatgtacctgtggtccctgctactctggaggctgaggtggaaggattgcttgagcctgggaggttgaggctgtagtgagccataattgtgccactgcactctagcctgggcaacagagcaagaccctgtctctcactgtccataaatattatatatagatacaaataatgtggttattgatggagcctcatctgttgtgaggcaggattggctcacagcactcccctcagtttagatagaaaagatccttcaggaatgtatgttcccctttgctctccgagtccaagtaccttttgttgacaaatgatagtaaagagagctgtcttgggtaaaggacatagtcttcagaaagtgcactctcattctaaataatagcagccttcagatttatgctgtcttcttctgggtgtttgtttaccttgggttagtctttttgggacccatcaactctgaaggtcctgtttcatgggacaaagccgctattgggcacatgaaaagctctccccagactcaactgatggactggagaagcaccagaggcacagctcacagcccttcagacccagcatgctgtggaagtcaagcttggtcagctggccttgcctgtaagcttgctcaggggcatagatcgctatatgagtactcttcagatagctttctaaggataaggccaccgaataggtgatccagatgatgaggtcttacaggatttaacactttgctagtaggttttgttccattaacttagatgggattgcagaaaacacaccttgaccacatggtaatagtcctgatggctgtaaaatcacatctaacacctttacgcagaggaaataattcagtgtcaatcatttgttcaactcaaactggtaaagtgcctacattttcccaggccttgtgcgaggcatgggactcagagatgagcagggcactttctgtttccgaaacaatcagaggagagtatgctagaaggtacaacaaatgcaggggatcccagaaatggggcctctagctcaggctgctcagggaggagaggggtgtttcctggagaaataaactgcttagcggaaactgctgaggaaatagaaacactggagcctcgtgttcttgggtcagagttggacccaggaactcaggcttctacctcctggaaggtgctgacctccatcagccagctgaattagcaccattttatctacagcaagatcaagagagagtctgtggcaggaagtacagagcctggggactgcgaagaaacagaaaactataataatactgaagccctcagaaccagagaaggggacttccagggtgcaacagaacaggtgtttgggagttggcaggttataggcactgttttccctttccaaaaatgggagaaaggtaagtgcctcgagagccctgtggaggggcctggtgtctcggggctccctgtttgttacccctgctctgccctacatcttcccagatggaattctggccacaagttatcaggttgcagatgaatagtgaatactttttttgaatttcatcattcttccccctagaatgactcattacaaattctgcgtccatgtgatgcattaatattgattaagaaacaggtgctctcagattcaattagcaaaactgcaatgattcacacagggttacgctggaaaattgggggaaaatatgcaggtgtgcaaatgagcctaatctgaaggtgctgcagcaggtcttgaaaaatgcatcccctccagcaaatgctttcctggaattaccctttgtttgggtgacaaatggacttgccatttcaaccaaacagtgaccccaaacctctgtggcttaggatccagtggaacttcacatttggagtcagacttctatgtcgggattcccaagctttcctgttgaaccactgcagctgtttgtgaaacacacagcttccttggccccaatctaggtgattcaaattcatggatttaggtgaggaacctgaaaatctgtaccttggaaagtaattcatgtgcctcttgtcatagacaagttagggaatgtgcctcaggagaaggctggaaacttggggctgggaagtgctgcctgcggttggatgatggtgggcacctcagcgacatcagccacccctttctggcttggctttgccatatgtagtatccagaggctatatctctccctgtggatgctgagtgagtagtgttctgatctaacacacataaaacaggaaggaacatcacgatttggcaattaatactttttaacagaaaaaaaactttaaatagattctagagtgtaatcatagacattcaacctggacttctagaacattcttgggcttctttctagcaaaacctcctttgacaacaaaagagagtttgtgacttagatgtcttcctgactgtattttagagtgctaaacttcagtcatagacatcagagtctcatagaatttttagggcagggagggacatttgagataatctagttcaatcctttcatggtgcagaggaaggcatgcaggctcatcaaggtggagagacttgctcagtgctacttgggaggtaagatgagagaactaaagatgagacagcacattttccgagtcttggcttccagctcccagtgcctctttctggccaccacactgtttctgagatcccctcattatttgaccacagtatgctaagaagcagggaaatcagcaaggacttcattttctttccatacatattaagtgagagcccaatatattcaaggaattgagtggcatgatgaggggtaaggatgcaaggtcacatggacacctaaatgaacaactgcaataaaatatgacaaatgcaagagtagaagtacacacggagcagtggcaactcaagagagaaagtgactaactcctcgaaaaattagggacgtcttctcagagggtattgagtcaaaagtcaaatcttattatgtcctggtgaaagaaatggcacacctggcagaaagaacagtgtgagcaagagcctggaggtttcgaattctaaagcaagtgtcagcaaacattttccgtgaagagcaaggaagcaaagatcttaggatttgtggtcatatggcttcaactctgttgtggtagcatgacaacatgtaagtaaatgggcatggcagtgggctaataaaactatttacaaaaggaggcagagagccatatttggccagtgggctgcagtttgttgacactctcttctaaatatgtgtctatcataagtagttcaggatggttggagcatagagcttggggaggaagaactgggagggaaggcgtgacaagatgaatctgatcagcttagtaaggacgagatcaagaagggactccaatggtaaagacatgcttggacaagtcatttatcatctctgagccttacctttctcatctgtaaaatgggaataaaaataattcctgagaaggactgttgtggatattattataatatctgagataaatccagcacagttcttgacatttactgagtgttgtaaaatgttggctgctattcatggcactttctccataattgggatgcatttgaagatggagatgtgggattgtcatgagttcggaaataggctctagaagcaaggtgttttgttttttccagcaggttaaataaggaaaagagatgctatttggccatgagtccagaggggaagtcttcaatggaggctctagatcaaatggcctcttattatctgaactcacttgcattaataatgatgaaaatctacttgttcatttcctccactggactttgagttccttgaaagtggaccaattcatttgtcatctacagaaccagaaacacaataggactcaatgaatggctaataaagatgtctttgtatctgtttctctgtctgcatgtgacacctcccttttcttttcccctttaagtcccacctttatccctatgccatatagactttgctgttagaacaatcatgacatgtaacagtttttgaattcttactatgtgctaggcataatccttaacaatatatgtataccattttatgtcttatataatgaggtaggtattagataacattgagataggtattgttattattcctattttgtagatgaggaaacagggctcagaagatttgctccaaatcttaacagccagtaagtggcaggactgggatttgacttatctgactctcaagcctgagtttgtgcactgtcttccgatgttctaattcattccatgtacattagtctctttccccaatcagactgtttgctgaatattttatttctttcagtacccaacctaatgtggaaaagcagacatttattaaatactcagagacttaatttgaaaagacttttgccccgtggtcatctgaatactccaaagaatgtactactaacttgttctcacctttgggaatcaccaatcttttgtcatatgggaaaaatgaaaatatttttatctgtttatatgctaagcagcattataacagctgcctgaaaatctaggcttcccatccatcacacaagcacctggatgctgtaatcacagatgacaaaccagctcatcagtgaggtctctttgcagaacaggtttgatactagggatcttcatggagaaaacattttctccatcaaaatgaaatgaaggcccactggactagaatcttccttttaacaatggcagatggtatccagcattggttcatttctttctgataagaaaaggccaagcttgcttctttcatctcttcattctccatggagccaggaaaacagaaagaaaagtatgatagatgtgtgtccattttctgattgtccagcgtccaacccccttgaccaagagggatgctgtctctcctccagtgtgtatgatcttggcaggaaagcaattctcaatgcctgtcctccactctggaaacttggagcttagatccttccaatattcctggttcagcagggaggcaggatgttgcatcctgagtatgtgatagcaaatggtggcttggcagacatcagcttgacccagcagtggtagagcagtgatggtagcagtgacgtatcagtgtcactgacagcctcctgaccagcatgtggttgtctctgatgcttgacttcccttgctccaagtctgctcttctaatttcccaccaatctccttccagaaaaatctccattttgcataagacagccagagttgatttctgttgcttgcaaccatgaatgctgagtgacataatatgggaagtagactttttatctacaatcacccagctgactgttgtctaaatagtcatctcttttccctggagttgttttactggctgaagagaaatgatttttttttctttccttcccatatttcagggacaatgataagcagggtaatgcccccaaagcaggaactacattgaaaatgaatacttattgaatggcccattagagaagtatgaaagctcatgttgcttttactcattgctctattctcaaaatgtagaacagtgtttcacacaccctgggtactctgattaatgaattaattacatggtacttattaatggctaaataaaaactcagattttcacatttagtcttcacaacaaatatacaaactagcaaccactgtctacattatacacataaagaaaccaaaccccagcaaggtcaagtcgctttcccattattgctgattaatgttggagttggaattctcagtaaggaccacctaactccaatccaggctttttctattccctatactgaggcaggcaaggagaataagaaagaagaaggaaaaaaagaactgaaaagaaagaaatagagaaaagaaaaggagacaagaaaagaaaaggcagtgaggtgaggtgaaggtctggttggtttaaaggggggtccttttccttggataaatgagaatttccagagtcagttctttctcagatacaaatggcagaagagggtgggctctgttaggtgctgaggttctgcagtgggaccaggaggctgaggttctgaggttcatcctggcccagagagagcaggtgtgagggggccgctgagcagacagcacagcagttcccatacacagctgtgtaggagcaaggctggagagctggcctgctctccatctttagaatctgcctactgggctccttgaaagaggaggggcctgccagggaagtggagtgcagcggggatggtacagggagggaactgcttcacctagcaggcagcactgtgtatatggtacctgaccccccttctctacctctccttgtctaggggttaaatattattattcccattcttcaggcagggaagcaaaccagacagcttcagttacccaaggccaagtgcccattgtgaactctgggagttctcagaggagctggctggaccccatggagctggcaaacccatgtatgtggaggtgacatttatcttctcagccaggaaggagcacgccatccagctgctgcccagagcccaggagaaccctgcagcactgtgattctcattagcctctgaaaggtgtgagggaaacatggaaggcagttatgcctggttttggaaattagggaggtttaatttaaaatatgtcagtttaaaacagctctcatcaaaacctactatggaacactaggacttattctgtctgaatggattttttatccactaaccgacctctgtttatctctgtcttccgccccttcccagcctctggtaattaccattagacactcaacctccatgagaacaactttttctagctcccacacattagtgagaacatgccatatttgtcttttaatataattttttatttttaggttttgtgggtacacagtaggtgtatgtatttatgcagtacaagagatgttttgttacaggcatgcaatgcataacaatcacatcatggagaacggagtatccatcccctcaagcacttatcttttgtgttacaaatgatccaattatactctttatttaaaaatgtatacttcaattattattgactatggtcaccctgttgtgctatcaaatactaggtcttattctttcattctagtttttttgtatcccttaaccatctggaccaccccgaagtcccccactatgcttcccagctttggaaaatgatccttctattctctatctccatgaattcaattgttttgatttttagatcccacaaataagtgagaacatgcaatgtttgtctttccatgcctggcttatttcacttaacataatgatctccagttccacctgtgttgttgccagtgacatgatctcattctttttttatggctgaatagcactccattgtgtatatgtaccacattttttatccattcatctgctgatggacacttaggttgcttccaaatcttggctattgtgaacagagctgttacaaacatgagagtgtagatgtctcttcgatatactgatttcgtggttattaatcccttgtcagaatatataaagagttcaaataactctataggaaaaaatgtaatccaacttaaaaatgagcaaaatatttgaatagacatttctcaaaagaagacatacaaatagtaaatagaaatataaagagttgctcaacatcactgatcatcagagaaatgcaaatcaaaactacagtgagatatcatctcaccccagttaaaaattgcttatatccaaaatacaggcaataacaaacgccagtgaagatgtagagaaaagggaaccctggtacactgttgggaatgtaaattagtacaactactatggagaacagtttggaggttcctcaataaaaaccaaaaatagagtaccctttgttctgttcaactggcctatgtgtctgtttttatgccagtaccatgctgttttggttactagagctcagtagtataatttgatgttaggtattgtgattcctccagttttcttctttttgctcaggagagatttggctattttgggtcttttatggttccatataaatttaaggattattttttctatttctgtaaagaatgccattggtattttaatagggatcacattgaatctgtagattgccttgggcagtatggacattgtaacaatatggagtcttccaatccatgaacatggaatatctttccactttccatttttttggtgtcctcttcagtttctttcatcagtgttttattgttttcgttatagagatctttcacttatttggtatttaaattcctaggtatttaattttatttgtggctattgtaaataagattacttttttgatttctttttcagattgttcattgttggcatatagaaatgctactgatttttgtatgttgattttgtatccttctactttactgattttttaatgcgttctaacatctttgtgtgtctgtgtgtgtgtgtgtgtgtgtgtgtggtctttaggcttttccaaatataaggtcagggaggacgcattggctcgtggctgtaatcccagcactttgggaggctgaggcaggcagatcacttgagcttaggagttcaaggccagcctaggcaacacagtgaaacactgtctctatgaaaaatacaaaaattagacaggcatggtgatgtttgactttaatcccagctatttgggaggctgaagtacaagaatcacttgagtccgggaggcagaggttttagtgagctgagattgtgccactgcactgcagcctgcgtgacagagtgagactctgtctcaaaacaaccaacaaaccaaagatcatatcatctgcaaacaaggataatttgacttcttcctttccaatttggatgccctttatatctttctcttgcctgattgctcttgctaggaattccagtaatatgttgagtaaaaacattgagtactaacatattactcaacatattactgaaaagtgggcattcttgttatgttccagttcttggaggaagggctttcagattttccccattcagtatgatactagatgtgggtctgtcatatatagcttttattatggtgaggtacgttctttctatacctagttttttgaggatttttatcatgaaggaatgttgaattttataaaatgttttttcagcatttttggaaataatcatattgtttttgtccttcattctgttgacatgatgtattatactgattgatttggtaggttgaaccatctttgcatcccagggataatctcacttggccatgatgtatgatctttctaatatactgttgaatttggtttgctaatattttgttgaggatttttgcatcaatattcattagggatatcggcctgcagttgtctttctttgatgtgtctttgtctggttttggtatcagggtaatactggcctcatagaatgaacttggaagtattcccttctccattttttggaattatttgagtaggattcagcagtgaagccaatcaggttccaggcttttactgggagactttcaactatggcttttatcttattacttgttatttgtcttttcagcctttgaatttcttcatgattcaatgttggtaggttgtatgtgtttagggatttttccatttctcctagattatccaacttattagcatatagttgctcatagtagctagtaataatcctttgaatttcactgatatcatggttttttctatttttcttttttttcctttttttttttgagacaccctcctctctgtcacccaggcttgagtgcagtggtacaatctcagctcactgcaacctccacttcccaggctcaagtgattctcctgcctcagcctcccgagtagattggactacaggtgcacaccaccatgcctggctatatttgtgtgtgtgtatttttagtagagatggggtttcaccatgttggtcaggctggtctcgaactcctgacctcaagtgatccacctctgccttccaaagtgctaggattacaggcgtaagccactccccctggcctcagtggtatcagttttaacgtctcctttttcatttctgattttattcggattttctttttttcttagtctgcctagaagtttgtctattttgtttaacttttcaaaaatccaactttttgtttcattgatattttgtattgttttcatttcaatttcatttatttctgctctgttatttattatttcttttcttctactaattttagggttggtttgctcttgcttttctagttctttaagatacatggttaggttgcttatttgaaatttttcttcttttttgatgcaggcacttggagccataaacttccctgttagtactccttttgctgcttttgggtatgttgtgtttccattatcatttgctccaatatttttttcaatttccttctgaatttctttattgatcctctggtcattcagaagcagattgtttaatttccatgtatttgtttagtttctgaaattcctcttgttgttgatttctagttttattctattatgaccagagaagatgcttgatagtatttcaagttttttgaatgttttaagacttgttttgtgtcataacatatggtctaccattgacaatggtccaagtgctgaggaaacaaatgtgtattctgcagccactgggtgaaatgttctgtaaatatctaccatatttgtctttctgtgcctagcttatttcatttaacatgatgacctccatctaaatgtttgagggggtggatatcctaattaccctgattcgatcattacacattggatgcatgtatcaaaatatcacatacactccataaatacgtgcaattattatgtatcagcaaaaataatctttaaaaaacaaacaaacctactgtagagcatttccacagagtcccatatctcctcctttaggatgatttcccttgaacacttcaatggttcttagaaggcaaaagcagcagctttggaagtgaatagacacagattaaagtcctgattctacacagaattatctgtgattctgggcaaagtaatttactcttctgcctcccacaagcctcagtttcctcccctgaaagattgggataaaaacctacctcaatacctctagatagaatgtacacctacagaataactaaataaatccactctttctttcttcctttcctctaacattcaatggcatgtatagtgtttgtcatacaatttaattttcaattacagttttctttctttctttttttgagatagagtctctctcaatcacccaggctggagtgcagtggcgcgatctcagcttggatcactgcagcctctgcctcctgggttcaagcaattctcctgcctcagcctcctgagtagctgggaactacaagcgtgcgccaccacacctggctaatttttgtacttttagtagagagggggtttcaccacgttggtcaggctggtctcgaacttatgacctcaggagatccacccacgctggcctcccacagtgctgggattacaggcgtgagccaccgtgcccggcccaattacagttttctaataagagacatttacatcatggtaatgctttgatgctatatttatttgtaatttattgtgtactaacagattatagctgcagcttatagatgaaagcttagtatttcatcatgagtttcttctatgttccatcaacaaatcctggcaagtagcagcttctccaaggccacctcctttgcatgcaacactctagcacatgctgcatggtttacagctccctgagctcaccacctgctgcctctgagtgtgtgctcatgatactccctcagttttgaagcctgtttctctgcccactcttgcctccactccacctgactaacatatcctcccttccttggggaagccttctctgacctcatcctgtaatggttccctaagcctgtttcacatgccaagtgctcatacacaggtgctcatgacactcacacttagaaactcattttccattttccatgcataggatagtaggtccacctcacctttacccttgtaaggggcctgtgaaacccagcaaatgactctggttcttagccttaggagatattgtggagatggctcactaagggatgaagatcggtgatgtccctagacctcttctctgtatgagtcacattatcttacatcccattaccctaagggccctcccgggagtccacaggttgtgccagcagcagccagctccagccttgctctgctgggtgaagctgggtcagtgtctaacttagtggcctccttggttgctggaaatgggaggagccatcgtgcatcagatgcttggactaaccaagtggggagccaggactcactctgagtggtagctttctaaatctgcaaaaactagagtttccagagccagggaccctggtttaatgtgctgctttgctggagcccgagcctctgatttcccttgttcagctgggcccatgataacttgcctcaatgatgcgaagagaagggaactcagcagatctaatgtgcctgctgctggaacctggctcctgcgtgaaacaggatgacatgcctgttgtagcaactgtcctctgagttgcagttaataaatctctggctgaatggatacgtggttgggattatacctcttgcatttggcaaatccataatgattcaccctcctgacctgtcactttcccagttctagtgagcattcttttctctctgctatttgtctaccttgaacacatttcttttcatgaattcaccaaaaatgaactgcaatttatttgcctgcaaatgcaagcagctgtgagtaccttgagggcagagattccgtctactcatctttacactgggaaaaacaatggaataaaaaatatattggtggccttaagtgtgtgtccagataaacttagtctcaaattcattctgttaccatgacaaggtaagatgagtaggtggatcaattttaaaggttctaccatctgtgcatctcattcatattaacatttgttaacaatgaactaaatgccactttaaagtaatgaccaacatctgtatagtgttttgcagtacatcaccaccttcaatattatctctgttttgggggcatggaaacttattcaggagccaacttgcatggaagcagcacagtatactgcttaagaggatgcactttgaagtgagacagactgaggtttaattccaggcttccccagctacatgacatgtgatttgggacaagttacttgacttgatttagccttagtttctgcatttgtaaaatgagaacgaagatacatacctcaaagcacttttggaaagataagtgagtttatgtaagtacccagaatatagtttgttctctgtgcatggtaatggtaatggtactcttgccacatacctcctagtaaatagaagagctagactaaggtctaggcattccaaatttcatgactcatctattgtaccagtttaatattacctaatagaacagttccccattttaaatttctattcaaaaccaattcatgcaatcaaatgataatataacaaggaatgctcatatttctatcttcatttacaaagttaaaattaatattccatctgtatattcattttgattggaatgcagagtgcctggtgcacagtgggtgttcaactaatgtttgttaaataaaattccctgtgaattctccccttgcaagtgctagacttggtaactgattataacaggagaatatcaacataatttttttggattgcctgaatcaattccattctttctggcccactttagggaaactgtcaatgacgaagaccctaaggaaactcatctgtggtccataaggagatgaatccccatgtctggggcatcatgttcactgtggcgccaccaactcagatgaccagacacaaatgaatttctcatggtactgtggtggaatcagctgttttgagttaactacctaagtgaatgttctatttttcccacttactattcatagaattctttcttttaatagcttttgaagaccctgtaaatcttttcaaatttttgggattaatccacttccactgtgtttccatggaactttgcttgaacctttattttagaacctatgtaattctgatttgtattaaaattctttatgcgtatttctgttctattagatgttaagctcttgacaatagacacttatataatctttgcacagagaaacatgcatgatgggtggggctgggaaggaaggagacaacaagtgagagagaaataaataaagagatgctatattgtgtctactccaagttcaggtattatgccagatgctttatagctatcacaggtaattctcatagaagagaaggatattactttctcggttttaccaaagagaaaacaggcatacagaggctaagcaacttcctccaagcaatgaagacagcaaatggtggagctagaaatagagaccaattctgtttagtttcaaaatccctgttgcttctccatctccatctcaatgttttgcacaagacagaggctcagtaagcattgaaacaagacctgataaactcacttgcaaataggaggtatgtgatcatagctaagcataatcaaatcatttaacagcttcaaagtacttgagcaatagaagattggtggcagcatatgtttgtctgaatacctacattatgaaaaggcaattcagttagatagaaagcaaagacaaaattaatgaattaagcttcatgtagaagcctagccttagttgctagatttgtgcaaaacaatcatcctagcatgctgttaattgttttaaaaaataaatgaaccggtagctattaattacgctttcatacatctgaaaaagaaaagaaaggaaaataagcaccaagatcaacacaaccagtagagaggctggtctgcattatacagtgaggagtcataaatcatgtgtgagtaaactttagagacgatcaatatcttgtttaactcttatgacaactatatagcaatagagcaatattgtttatacagctctttgtcatcttaacattatctcaaattcgcataaatttgtattctccaaaagactatacggtatatattattgcctgcatttcactggagaggaagcagaggttcaagggtgtaagcaacttgcccaaggttggccatatttaatgcaagagcaaagaagagaaatgcagaccgttaaggaactgcttttcttctaagaattttgatggttgtggtgaggtccatggagaaaagttgattactccagtcacattatccctgtctatgctgttccatctttcttctctctctatggccaatgcagaggacccaggatgcctcacatgtgaattcaagaaatggaaaatttcgctttatggtttaacataaacttggggtggaggggaatggggagaatgctgggctatgaacttcttgcactgcctgaatgtcctgacaacttcctttgtatgaatggccattgggggaaaaaatcaaggaaacaaaaaataatatgttatggaaaccatgtggttgcagtttcacatgatgggggtgggtttagggttatttgcttgcccctatcagttagccacatgttgaaaaggaggaaggaccacagactgcaacaaactgaatcaagactggaatgataatccctgacaatctttaatttgctaaaaacttattacattatcacccaagaggctggataccccacagaaaccaggttttgtcctgtgttgaaactgttggctcagatggagggataaaacaaaaagtttgtttggttagaggttgagtgcagagacatttgctgtagcttggtaataaacttgtctcctgcacaatggacagtagaatcgctgaacagctgttgattggtaaattagtatagagacccacatggtatctgtagaggagagacaatttcttttcccttgtgtctttcagacagatgtttggtgttccttgtgctttctttccttaccatctcatttctgacctttctttgtcaactgtgcattcagtgtggggttatcatttacctacctgctgtgcctccatctgccttccaatgcctgagcatgctcagattctggacatccaatgcagtctgatgaggatttgcttttcagagtccttttctctttgtacacaacacatcaaatggcaaatggtgactgtgggacccacctctgcaaagtcaacagatgccaggtaggtgttcggaaaaaagctgaattgaactaggcaggacagatatttgcaaattaaaacaactgctttcctgccagggttttcgttgggtctcgaaaggcccatggagagaagttaattacaccagtcaccttgaatttcttgaatatcacaagagggaaaggtgtgtttttagttggtttctggttccattgtgaacaacaaaaatgagcctgttaacagggcattatgctgcctgcatgctcccatgtatagacaggggtgtaagaactggaaagaaagctgctggaagtgccccttcttcattctaccagtagaaaactgaggtcagagaggctacatgcttggttgaaggtcatatagctaattgtggttgaggtggatgcggagactacgtcattttacccctgggttggcaggtgtcaccccactatattgtattaattttaatttctctgtattgggctgtaagactcctcctcctagtcaactagggttctatttttatttaaaatttaatcatatgatatttactaaataacaccaaagacataaaaccatataagtatcatgtgttatatatctatatatacactacatataacattcaacatcatcaatttccttattctttcaacaaatatttattttgggcctgtgtgcaaagcactggaatagagattgtcagagtttcaaaggtaaatataataaatctacagtggggtgaaaaagttgagaaattaaaaactaaagagtacaacccaggaaatgtagtaattgcagtttaaccaaaggcatttccatgtctgtaaggcaagatacttgaggattttcaaacatgtgaaatcctcactttaaatagggtttattgtaaaatcttagttaactagagggaattatctgggactctcagttgatcagaactgtttttgctagttctgctttgggagaaagagaccacaaagaatgcaggatggcatcaggaaagaggctgggttcacttccagattttccagaagttttaacttctctatggctcagtttcatttactgaaaaaggccaatgtgaagcttcattgtgtgggtgggaggataaaatgtgtgtaaagtacccggcccagagtctgacatacagcccctgcttagtaaatgcttattttcttagatctcatttctaaaaatgcacttcctgaggaccttcctgggcttgatccatactcaaagctgtctctggtgccatctacaccataagataaaacagtgaggaccaacattcgaaatgatggcagcaaggccccaggaactgtagccatctaaacacaattctgttctcactaatgtgttctgattaccaaagaggagcaatggagttacacattttggaagagctttttagccagagaaaaggaaacacatttttggaagggctttttagccagagaaaaggaaacacatttttggaagggcttttggccagagaaaaggaaaaagtatttgccacatagtcaaccagaagatttaatgactcagaatacagtggctacaagaattgtgggtgactgaggttttgttttatattaacagaacaaaggtgcctttggtgcaggtctgtgtttcttggcatcacttcctccaggaggtaaaggacccaagtgcctttactaaaaataatttctcacagatctgtccagtgctgacagagctcagggctgaccccagggaggcacaaggtgacctctgcatggccttcatcctcactcgtggtggtcacagggcatcagtgtcctgggcagttgtaggaaggaataggtgtgagtgtccacatactaatgcttccaaatgtgtcaaatctccctgctttccaaaaatagattttgtgggtagattgaagtgagagagaattcaaagcacaagaaaatcatggcataaaaaaggcacagaaagcagagctattgatcaggagctttattttatagaacggggcttgcagtctggaatgagacagaggtttctagtaaatagcagcagtgagactggaacctgggggtgctgatttttcatccagtgtttttgctgacatctctgtgatgacctggtccttcaccttctttcctaacgccacccgaggacccctaacatggagttagatgttaccgatggaaagcattgtacagagtctgtgttccaatcctgttctttttttttagaggcgaccactgaggcccagaaaaggggaagtgccttgtctgcgatctcatggaagttaatgagaaagcctgacctagatcacctgccctatcatagacccagtgccatttctactgcagtgtgcaaagacttcaaagaaggccagtgtgctcccctcacccccagggattgcaagttcaagtgtcctgtctgcactgtcctgaggccattctaggccattgtgcagagaaatctatattctatggggtgggggagatagggaagagattgagtcaacaaaacagattagtagacctattactccctagtcttagtacttttttaggtaatttgagtaaaactcatgaatcctagagcactttaactttgggttaaatgtaagtccacaacaatagtcacaaaattgtattgctctgggcttctctacctatagttagggtgtctggaactcttcaaatgagggaagtcattctcctaactttaatgtaacatctgtcatttcatcctcttcctctccaactccctgtagtcttgtccattgctaagcccgcttgcatccatgcaaggagccctctactttcacacagaccacccacaaggcctggagaggtcacagcaaagccagctcccacagcaattagagacattggcattttcttctataaactatagaataggtgtctttaaagatgaggataattgttagggtgacctccctaacaattattcagtcattattctcatctttaaaggcctcctttttactgccagaagcatctcatacacacttagatttctagccacagaccatctgccagctgtttctgccagaacagctgcccatcagaaggaagatggaccaagagagcctttgcacagctccagagtgcatctccagcatcagagaggcaggcagccttgtcatgggtagctccagcggttggtggatgacacagccaacttggacatgaaataggcactgagggcattaaagcagcatgaaaaaggatatccagttgtccacacagtacagtgtgctgctgtttctgtggacttcccacggtcaggcttcaaactctatcttgttctaaatcatagcacgcaggcgcatgcgcgcgcacgcacgcgtgcacgcacacacgcacaccccgccctccactaactcatgaggtgacctgacctgaggatcattgaatccagtcgttcttaaacttgactatgcctactgaccatcttgggggcatttagaaatcacagactcccaggccccaccacccctggcatactgaatcagaattatcaagaggtaaacccctccactcccttaaaaagaaaggaagaggccaggcgcagtggctcacacctgtaatcccagcactttgggaagctgaggcaggcggatcacgaggtcaggatttcgagaccagcctgaccaacatggtgaaaccccatctctattaaaaatacaaaaattagccgggcatggtggcatgcgcctgtaatcccagctactcaggctgaggcaggagaattacttgaacctaggaggcagaggttgcagtgagcggagattgcgccactgcacacctgcctgggtgacagagcaaggctccatctcaaaaaaaaaaaaaaaaaaaaaaaaagaacgaaatctatatttgacaagagtagctaatctaccacacatccacgactagcatctaggggctactgatcacagttcaaatatccacccctccctgtagtttttattgaagaggacacagtggctctgggagaggaagtgacttgccttaagcaaagccctgacagaaatgggactacgagactagaaataaatgccttcacctcttttgttttgctccttcgcacaatgcacatgccctgtcccttaatgatggccacagcttccttcctatttttctatattcataatacaacacatggacatttggctgggcaagcacatttattgatcaaaaatatgtaatcctccttccttatagaagctcaggttccttctacgttatttaggtgggcacctcaaggcgctaggaagaccctaaagctttagagatcagcctctgaaaatgtatgaatactgttgtgcatgtgcatctgtgtctgtttcaggcaagaaattctgtaactttcatacatgcccaatggcatttatctacatccctaaaatggctaaaacttctggtttacaatatccctaataagaggctactggtttgaaggagatggtttagaacacacacaaaaaaaatacaaaaataattttacttgagagatgcagcttaagttactcctttttggcacatctaactgtgccaggcatagtgaaaatgattgataaaatgtcaagatagaaaacacgatcataaaagctaatgcagcttgagaatttttttaaattggtttaaagttgcattgtcactagtgggaagcacaagtatggccaacccaaaaggcctcaaggaaaaggcaagagaagtcagagaaggctgaagacgcagacttggagggataataaaacattttatcagggcaggacttgagaggaatataaagcagtaagttttaattaaagttatgctagtacactaatttgggcaaccaagattcataattaaaattttatgccaactctgcgcatcaccaaacatttttaatggctccaggaagaacatgatgtgggtacaggatacattgcagtgaacatcaaggggagccagtcaaatgcacagggtggggaaacagtggggagtagctaggaagttttgtcccacaaactctgaaagctttcttctgaaaaatgggcagtcatagctacttggtcaaaggagtgtccaaatgtcttttgcaacacagcaaagtaccacttgctggtacttttctgctttccccaattcaatatggttcttggaaggcatgaatcacttctttcatctttttatcctcagtatttaagacactgtcttatatcagttatttagttccttaacaatgctgcaaaataaataaccataaacccccagtggcagataacaatttatttagtttataagtctttgaggttctggtgattttagctggatttgctcatgtttctgtggttatctgtaagtcatctaggcagctctgctaaactcactttgtttgctcatctatctggggatttactggctgttggctgatctagcatggtctttgttgggatgatggggcaacttggctctccaccatgaatctcatcctccaacagactcccctgggtacaatatcctaacatttccttggccacagcaagtcatgtggctaagttcagggtcaaaaggagagagtgctaccaaattatgtggcaaagagtatgaaaatagaatacagtaaataattagggcctttgatgaaataagtctcttacatgactagactagggtaaaggctcaataaaagtttgttgcaaaaactgagtatattatccaaagaagatatacaaatgtctcataggcacataaaaagaatggtcacattaataatgatcagggtaaagcaagttaaacccacagtgagatgccatttcattcccactagggtggttgaaataaaaaagtcagatgatgacaagtgttgatgaggatgcggagaaactggaagcctcatagactgcttggagaaatgtatgttggtgcagccactttagaaaacagtttggaagttcctcaaaaagttaagcatagagttaccttttgatacaacacttccactcctaggtatatgcccaagagaaataaaaatgtatgtccacacaaatgttcataacatcattagtcataatagccaaagggtgaaaacaacctggatgttcatcaactgattagtagaaaataaaatgtagtagactcatataatgaaatattattcagacacagaaaggaatgaagtaccggtacatgctacaacatgaatgaaccttgaaaacattacgttaaatgcaggaaaacagacacaaacggctacgtatgattccatttatgtaaaatgtctataataggcaatctatagagctagaaagtagattagtggttgtctaagtctgggtgggtcagagggaaatgggggtgacttctaatgcatttcttaatggagtgattaaaatgtttgaaaattgatcatggtggtggttgcacaactctgtggatgtacaaaaaaaacattaaattatacacctgaaatggaagaattttatggtgtctcaataaaccttctataaaaaaacaagaaccaaatgagataattcctttaaagttactcagcacagtaccttacaaccttggctaagttaaccatacttcataaaatctatgatgctatagattgtaagagacaccattatttaatatacaacaagaaaaacattaccaagttaactatgacagatcatcaattataagacatatcttaattttgaagatgttaaaatatggaaaatgtatattagaatcaatgaattatggcatgtgttgaagaaatagcatctgaagttaaatctattcaactgagtagatctttctgtcttcagattccatttttaggctcagatatctttcctagattaatggattttgggggtatccacctttgactcccagccttcatcaaattcggcaggtgggcccagaagaagtacttgccctctctggtcctacctggtgctctgtcattccccttacagctctatcctaggagtgcctggtctgcctgagaatctcttgtgtttttgtaggcatggatctctgagtgtggaatggacctgcctttccctcagggactggaggtcacttctgcctcccaaacccttcaagcatcttctctctctcctatgatgggatgtgatgaggataaacaaggaaagtgctttgtcgtggcaagagacatctggtccccagtggcagcttccacagagaagagagtgtaaaaccacacacatgttcactttcgtttgggtgaggagtagtcagagctgttgactaacggacaataggatgcatgaaaggtccacccatccaacttgtggtcgtcagtaaatctccagtcgcccttggggactggggagaattattttctccctcttgcaatttacaagtatcatctaggaaagataagacagtagcttcattgttggcaggctgtcatgggctttcttaacagcgtgagtgtgctttctaattttcacactagaggaaaaaaattaaaaaaaaacaggctcttcagttttgtcttccatatacgtgaatcttatatgggctgtagaattgttctgtggggacagacaatgaaaaaaaaaagtgtgatcagataccttcctcagaaacgaaatctagaaagaagagtaagcagtgtggtagatgctgtgtctacatcactacagttctcttccgctggcattttgttctggatgattccaggtgtagagcagaacttcatgaaaattatagtgcagtaagaagaaggcattctagtgccagacaacccatgttttatgatagggatctaacccagtgacaccaggaagtctttgatcatggtgcgtaagttgtgtaattcccatagtggttcttgtatttgacacatgtaagattttctttttgaagtctcaatttcattaccgaagacactgctcagagaacaattactgatagaccccaactgaagaagcttcctgggaaggaggtgcagggtgtggtctagatgcctacagttgggtatcatgactgagagacggcaaatagcattattcttcatctgggttccaagtggtggaaagtgactgcttggcataccctgtgaatgattctgaggctgctttagaacttcaggtggaaagccaactattactgatcatgcctatctatggatttagctagggcttggggtagagttgagttctgcctgttacactatgtctcattaatttcctctcagggagacagtatcctagcagggaatgatttggaatcaggcacacctggtttccatcctggttctgtttttcatcacatgatagtggagcaatttatgtaatctccctgaacttccattttctcatttgccaagtgggaaagagctcactctgccatgcactctccaaaaaggctttgtctaactcatgtgatcttcataaatgcctggcagagtcaatacctggaatctgtagaagaaagacacttttcacatggggaaattctttcccctcaggctagtgccttcagaccgagtctaatgtactctgcaggctctgcttggatcatttgtgcctgatgtctgaaaaaaaaaaaaaaaaaaaaaaacaaccagaagcactccctacatttgagaaaaaggacatctgggaattaatcctgaagttgggaggaaggttgctgagtctggattcagcctgaggggcagatggctagggatgtccccagagtgtccccacctccacttcatgtgcagatgacactgacagctgtggtgaggaagggccttgccatgtccatgccatactcattaagccatgatatctaacagccaacagctctgcaacctgtacctacttccaaggagtcaagctctatctgcttccaggctctgctgaatctgcctgtatttaagtgccccatttctttcccagaagtaataaaacagtcatctcgttgacattaagtgcggagtagcagacagcaagactcatattccaaaatctcaggaccctgccagttatgacaagacactcttctggctacagaattaacatgctactccgggtttaaatggggggattaggctaacacagagcaaaccagtttcttccttattttccctgacatcacttgagatctcccagaaaatggatagttttcaactctctgatttgtgcgcaactaggatcatcttgcaggaaggctgttcaaggagatgggtttggggtttctgccttgagaagctgataaggatggggttttctgcctagcgattactgtagcagaagtggccctaccttccatcctcctgcgatggggcctccttttcctgagcctttactgtcccaaagtagcagcaggactggacagctctgcccacagcatctcccgctcctgcattcctacattccaggcctcagctggagactacactttctccttactccctcttctctccaaatcccggcttctcagtctctctcctagacttgcaatctaatatagccaccaaaaaaatgtctgcctattttgaaatcatggaaaactgttggtttatttctaccttttttgggtggtgtgaaggaataagcaaagaaacactacattttaggaaaaggagaaatgtgtacaatgctgatttttaagttccagctttagtcagtttaggagcataaggctatcctctacgactcagtttgctaattaagtggtgattggaatattaaattttaaagtataatttagtcagacaataattaccagcgaactaattaaatttacttttcaatggttttcactttcaccgcagtgaacctgtaagttactgagctgcaaggaatcgagcatctttccttttgtcagagaagaaaaagcaggcaaagcaatgataatcaaagagtctttcttctacgttgtatttcgtatgaattgtgtagtagttaagtgcataggcccaggagctgagctatttggttcatggtatgacttggatactcactggccgtgtgatcttgaccaagttgctaaacctctctatcccccagtttcttcatattaattagtgtccatctcatagagtcactgtgcataataaattatttattatacagtttatagaatggtgcctggcacatatttaaatggtaaattagtcctatctatgatgatttttaacaatctttgtgctttctaaacttatctccttcaatgtcaagcctattaaaaaatacaaatttctataaattaatctggaggaaaaaagagaacaagaaaagaaagtcattgataacacctgccacacaaaattagccaatcattcataaattttgacctatcactgtccgcatttgtttccaatgcttctctttcatcctcttcacagaatgctgctcgcttactgagctctgagcaagttccatcccatcttgcttaccttgctctccccacaagatcctctcagactagactctccttttatttattgggtcttctcttttgaaactgctccctgtatctcattcatggtcaacttttgacttcaggtcagacattttgttttccccttattgaaataagtctctgtttctattaatatagactcccagtcttcactaagactctgccttagtttccattttcactcttgcagcttgaatagagcaccaaagagaacaaatgaatgtgcttttccaggagaaataaagttacacacatcccactgaaaatggaggagggggcctgaaaactttctagctcatttttactaattaaatacgtatgtgatgctatttatattttattatttagtaacttgtctttgttttattaccttagagaatgcaaaatcaaccataagggttttaaagcatagatttatagcactttctttaaccctctttttgccagaaggtcttaagttccttaattgcaaattttcccactttgagggtggagaactagggaagggagagacagtacttttcctgaactttccattccatattgctgggctcctctgtggggcacctgcatttcctgagtctgaggtctttccacattgccttgcagggttatgtgactgtcttgctgggacgcctggtctcagcggtccctttcagcactgtctgcatgattttcacagaaacatcttagttccagctacgtttgccactctgggcagttgtttggcaagcatgccatgttaacatgccatgttctttcatgtttctgtgccttagtgagggctttccttccatcttccactattctattcattaacttaataaacatattatgcagctactgtgtgctagcgattggggattcaaaggtgattgagtaaaagtctctcccttaagggagattttattataattcctgagaaggacaaatactgagtaaacaattgagtaacgaagacaattacagtgctgtgaaggcaataaccagggtgacaagataaggcagtggttctcagctgtggctatacatcagaatcctttggagaacttccaaacttatgggtgcctgggccccattctcagatcaatcaaatcagaatttctgggaatgaggtccaagttctagtattttaaaaactccccaagaacatttttaaaaacagttttattgaagaataatttacataccataaaattcacccactgtaagtgtacaattcgacagtttttagtaaattgcagaattgtgcaaccatctccatagttcagttttagaacatttccatcacccaaaaagcttcctcccacccatttacagtaactccccactcccacccctgggcaaccactgatcttctttctatagatttgccttttctagacaattcattccccagggagtttttggtgtagtctggattgaggacctttatgactgagcaaatgaggaagacagtggtgaagttagatctgaaggatgagaacaaaccagctgtgcaaacagtgtgtagaagagccctctggcagagggcatagcaaaggctagggcttggaggaaggaaagagcttggcccaggagcagaaaggaggccgctgcacttaatgagcaagggtgagagtagagcaagagtcagggtccagaaccttcagagctttgtggtatggtgaggagcttgagttttctcccaggagcattgggagatcactaaggggttttacatagcagtgtgacatacctcaatcctcatttaaagaattgagcagttttgtagagactatattagagggaggagaaagagggaagcaggaaggtcagttagaagactagttctatgtggctgaattcagttcattctttaaggcctgattaaatgtgacccattttgggaggctttctcagtgttcctacttttgcttccatagagctcaatttacactttcattaaaccaacaattatatgcaatcgttaataatctgtttacatgtctatcataggctatcaactcgtttggtggattgcatggggaaaaacatctcactgaacaagtaaattaatgggaaatacaataaacaaataaaaatgagaaagaaaaaagaattatatgttgtttttccttctatttctagcacttggcactatgcctggtacagtaacaggtgttcaggaaataaatgtttgttgaattgaatgatgcatctcttcaaggatcaagaccatgctttatgttttgaatccccacaacaagaagcataatttaatgtacaaaataggcaatgcataatttcatgttgcatacatgaatctaccttgagactgaattccatcagcacaaggaatataatgtgtgataataatgtatagtattcaaagcactttccttcattggggaaattgttgctgagcacctataagataacaggcattatgttatgtggtgctggctagtacctggtttaacaagatagtaagagttcccttgagagtgactgtggtcttgttgaaggaagctaaggagcaggggatcatgtaacaggcttgaagggaagaaagtcaaatttcattatccccattttacagatgagaaaaccaaggcagattaaagtgcatgtctaaggtattagttgagatgcaaacctgtgccttctgcttccaagttcttttgttggctagtggctcttggaaagaaatgccacgtctgggacacttgggcatttccctgtagaaagcaatggttgtctctaggaggcacaccatggtgaacgcttctgaagcatggaatttgcagctggaggagaccctggagagcatttgctttcgctgctttattttatagataatgaaactgaggcccacagaaatgaaaggactttctttcaggttacacaggtatttagtcagaaggccatgcattctcagagtgaaaagcccttattcattttattgttaaggaaatttagaaccagtgacatgaaatgatttgtctaaaatcacacaactaggaaatggcagaactccaacaagaacttaggtcctctagctcttagatctgttttctcaccactaatttgtagaacacttaaatgcttatatctgttgtccaccaaaagacataaaaatgttcatgccaccttttttaataatagcgcaaaatagaaataacaaaaaccttcctaagtggtagaatgagtgcttacattgcggtatggtgacaacatggaatattacacagcagtgaaaaagaatgaactactgcttcacaaaacaaacatgggtaaatcttaacagatacaatgatgtgcaaaagaagtcagacaaaaaaagagtccagactacatgatttcacttatgtgaaattcaagaacaggcaaaatagtgattgaggtcttaatagtgccagcggctatggctgatggggaacattagtggaaccttgcagggtgctgggaatgttctgtgtctggatctggtggaggtaacataggggtatcaacatggataaaaatctgccaatatatcctcttaagatctgtgtgcatttctaaatgcaagttatacctcaatagatgtaatgaatgaaaaataaagtttccactgtcatatcccattgttctcactacagatctgagaggtaagaccaggtttaagaatattaggcttagggaatttgctgaccaatctcacagcccagggaacatgtcagcctagccataagctctgcttgaaaaagctgctggttttcagtcaattgaagaaaggttttaaagtttcttagagagtttataaatgtgttaattacagtcatcaagattttgtattgcaataaatgtttatctaatgggtttaaattaggcaatttactcaatttgcttgttatttcctaattaacttctgaaatcctctttctctgacttttcaacctataccaatagagtttggatctaagaaattttattttccttttagcagtacgtatagctttttttcctttttcttgtttacccatccaaaagttctacaggcaatttcaaatgtacatctgcatctctgtttcttgaacttttgattttgttttgttttagggcaagactccttgtccctagaaaagcttactgctattatttacaatagaagctaatagaaagcaaataaatgaccaatgacaggaaaggctcaagtgaactataatgcatctgctagatggaatataatgcagccattaaaatacaacaatagcttggaaagtgcctataatattgtaagtggaaaaagcgagcaaaattgtccatatagcatgtctcaactaagcaaaattacacatgtctaaaagtaaagtatactaaatgtcaacaatgattacgtttaggtaggagaactagagtatattgttattttcctacttttctgtatttcccaaatttactttaaagaatatgcactatatttataatttcaaaaatgacatctttgaagacaaacaaaattcattttcaatatctttaaggcttcctttctaaatgtattctgtttttcaaagctattgagtttctcatattactaataactttatagctttaaatcagtaaactgaagtttattaagccctgacttggcatctagatcttctcatagcactatgagacctaaataaaaaaaaaaaatacaatgatgcaaataaaaggaacaaaagtgatagggaaaaaatagaggctaatgtaagaatgaaaacagtttattttgacctattgcttattagacccttgaaatcagttttctcataaacactccctgatgaaggtagatgtgatcattcccattcatttattccacagacatttctaaacacctattatgtgtcaggcactgtgttcaatgctggggttacaaagataagtaacataccaacattgtggctatatgtcatttataccaaaattattatacctaagaaaagtatagccctttatctcaaggaagcttgcccacagaagagatgcaaaaaacagattcagaaaggttaaatgacttgtctctgtcccacagaaggacagtgctagagccaggatttaaattaagatctcttgggctttactaacatgctctttgtagcacatccagcagcttctctgcaacatcctggtatcgaggaccatcatatgatacagacgacggatgctgcaggactgacaaactcctcagtagctggcaaagctttcctgaacaatggaggacctcactgggctttatagtgggtaagatttagatatgtggacatatcggggaagatattaacagcaggcaggtgagaatgaccccatgatcatggtgctggggtgcagaagggaaggatgtgctgggttgaggttgggggtgattttccttcagtgaatcacaactgagtccagtgaattatgtcaaatataatgcaggggctgcaataaggaatgacaaagagctggcctttgattcctcagatattcattaaacatctatatttggttgggggcaaggaatgaagtgatacatataagccatcatccatcttggaagggaaatgggtccataatcagatcatgaggccaaaacatgggacagaatgctgtcatttagctttcagcctcaaattgtcacctctgcagaaagacccggtctgtagtagtcatccagtcatttcccatagaccccaatcttaaatctatacagaatattgatcaacattggttatgtttctcagtttgtcacttttaaacaaaagtgattgcttatctcttttcattagaatataaaatccaagaaagcaggaaccatgtctgtctgatttctagctgaattcttagatcctcaaacaaagcttgaaaaagaaaacattcactaaatatttattgagttaattaagtgatttttttggagcaccaagaagggtttctagcctggacaggaatggggcatggatgtcagagaaggcttcctgcagaaggtggcagtgagatgggccttaaagtatgagcaagttctgtatggaatcagggcaagagcgagagggctgagggaagagaggaagggcattccaaggcacaggcagacaatggtggtgaaacgtgctatgcagaggagctgggaagtgtcaggcaggacttgcctaaagatgcagctcaagaagaagccccggaagcttccattttatttgaaggacaaaggagatcaattggagagtttgtaagtggagatatgacatgatcaaatcagcatttaaaaaaattcagcagtatggaaagacacattagggtgacacaagattggggatgaggttccctgttgagaaaaagtggccccttaccctccaggagctgggctgggactatcagccaggacttgatgcttgcttgatcaaaataaatattttctccaaccacaccagacaaggccactgcaattccaatgggtcaagtcaaaaaacaagatcaccctataataatttctgaacacaggttgggcacagtggcttacgcctgtaatcccagcatggcagattacctgaggtcaggagtttgagaccagcctggccaacatggcgaaaccacgtctgtactgaaaatacaaaaattagccgggcatggtggtgggtgcctgtaatcccagctagtcgggaggctgaggtcggagaatcgctggaacccaggagggagaggttgcagtgagccaaggttgtgccactgcactccagcctggatgacagactccatctcgaaaaaaaaaaaaaaaaaattctgaatgcaaacaaaaagcatgaacatcatccacactataaaaatgaccaaacagtcccctttcttggctaatatgagtggctgatttttttattatactttaagttctagggtacatgtgcacaacgtgcaggtttgatacataggtatacatgtgtcatgttggtttgctgtacccatcaactcatcatttacattaggtatttctcctaatgctatccctactccagccccctcccgacaggccccagtgtgtgatgttccccaccctgtgtccaagtaatctcattgttcagtttccacctatgagtgagaacatgtggtgtttagttctctgtccttgtgatagcttgctgagaatgatggtttccagcttcattcatgtccctgaaaaggacatgaactcatccttttgtatggctgcatagtattccatggtgtatatgtgccacattttcttaatccagtctatcattgatggacatttgggttggttccaagtctttgctattgtgaatagtgccgcaataaacatatgtgtgcatgtgtctttatagtagcatgatttactatgatttattagtaatggtttactaattacagttttaaccctgctgcattcttccagctgtgtagataagatttactaggatatgcaatcttagaactagccccatttcctgacagcacacagtccagagtgaagccctgcttccttgaactgtcctccaaagtatctaaatctgaatcctgtaagtccctcctagcacctcttgctgatatgcctcatgatatctcacactatgcattgtccctcatagaaacagcaatacactcaacctgttcaacagcagatgtgttcctgcctttgtctggaaggcaatggcaccgctaaaaggttgctgcagtcactaatatgcggaagcccacctgtaccagctcatgctgattgccaaatttttaggaattttgcaagccaagtattaaacctagcactactacaaattaagttatataaacttataattgaagacatttaaagatattaaaaacaacggtaatacgtttactaattcttttcataattttacgtttttttctggagtacattagcattggttgcatctatatggtagagatagcataaaatggtgtcctactgtgcatctgtttccaatcccatgtttagtgtcatcatgttgctgtgaaattcaccatagtgaaaatatttacaccactgaaattggcaaacactacaaaccaaggcttctgctgtgctttctccagttgattggtaaacatttactagcaccccactggctacactaatccatggatgttgaggccttgaagaagatattgagagcaaagctggagatctctggatggattcaagaaatgtttaggtgataaggtaattgatggagaaggaaattaattatctaaactcttctcctgccctctggtataaaaagtataagcatcagattttctttgtctaaggagtcctatctttgggcactgagatatccttttgtaatgctgtcctgagtcccacctgctctcaggctgattgcctgtctatggcttgagtacaaggaaaggcaagaaatagctcaggggaggattgctgacagcactcttggagtactgatgagagccatcaggatgaggggacctgcttaaccatctcccaaatagctccccattttcaactaagagaacagtcacaataggtgagccttccttttatgtcagggtctgtttagaaatacacatgatcaggttatttatttactttaaaaagttcaattggcattaaaatttcacttggactaaatcggataatagaagaagcacagagtgaacagaaaaagcacaaggtgaatagaaaagagggtcatagataacagattaaaaattataccaccaggagaggaacaaaagcactgtgctctgaaggaagcagcttcctctagtgatggtatctggcacattaatagtccaggtaattaatggttgtaaaacacttcaaaagcataaagcactgcatcaatgctgagacataattgtgccattatatcagaacgtggagcttcagtactgcacacctacggtgcaggtttttaaattgctgcagtcttggcataaatccgttggcttccatcaggcgctggcctgccccattcacccaggctgctgtaaggggccacgcctgtgcttacatgtgaaataagaagtggtcagcacatgcccctcctcccccatggagcactttcagatgatcaggacctgttcagaactccagtaactcactctcaggtgaccctaaggtcagtgttattttccatggttgtttgcatgtttcacctgaaggtctaggatcattccacctgcttctcttgccttctgtgaagggacctgcccatgagagagagctggagctttagtggattctcgataaagctgtgtgcaattacacagtgagggtgaaagctttcccctccgaatggctccactcccacactagaatcctaatgtcccataggatataccggcttttccaaccactcatgggaagcaggtattataaaaaaaattcctactttgtagataggagaataaaggctcaaaaggtcaagtcaaatgcagagggctcaagcctagctctgaccctaaatctagcactctttcttcaatgtttccaagctctcaggtggcttatgccactgtttaattttctactgccttgtttcctgctacagtcaaaatcataaccatgccaaggacagaacccactgacattgcagagagtgcttttccagagctcagagtgctttggtatttgtcattttaattaatctggtctgtgacttcatttctagctgcatgatcttcggcaagaccttaacctcttggggcctcagttacttcaattgtcacattcattaactcaacattgaagtaaggtgggcaaaattttattagtattaaattattaataaatatgcattaataatgacctcttaaacttttataactcttcagagtttacaaagcactttctcaagtgtcttcttaatctcttcttccaacagctctggaaggtcgctaaggcaaatgttactactccagtgggagtgtgaagaaattgaggcctagaggctccagaggcattttatataaaatgtgttttgggaaaatattagtccctcaagatactctatgaagaaatgtacgagtgggaaatgctatgttgcctacttagaaaaaagggcaaggcaaattaaaggctgttgtaagtcctgcggtaaggaaacctgcttaattttgtttaaatatgtttgctgaaacatataaccatgaaagagaaactgctttctctgaacacctattaatatttcataaaactaggttttctggtgctcctgttccatggaacccttagtataatcaagactaagcaatttgatcaaggtcatgtgcctggcaaaaccagttcttctgtttctgagtcaatgtgaaacattttacagccctctgtccataacaaatttaacaaccttttttgttcagtttcctagctgtttttgctcagtggagctgggcaaccactccaacccccattaaattccacttgttgccaatgaaatgctaagttacctgtactgagcaaatttcacatcactgtgtagctggcccagattctctcttgtctctcttaaacatccggccaaaggtacaggggtgggagttcagggaaaggtgtagtgaaatttctggtgtcttgttggcttttctttctgagttgcgttgaacattccagagacagtactaaacaccaacaattaggtaaagagactaaaacagcagtgctcatctagaagcagctccacccccgcctcctgcctggggacgtttgaaagtatctggggacatttttggctgtcaccccaggtgggtgctactggcatctagtaagcagaggccagggatgatgatgaatgccctatggtacaagggaaagccttctacaacaaagaattatcctgcacaattatcaaaagtgctgatgtgaagaaaccctggactaaaggaagtgagatggtttgggttgcgtgtccaattattgaggcagcttggattactgaagacagcattgttccgttgcctgagagtcagtgttcaagccctgcttcaccagagtgagaaagacttctggggctcactgccacatagttctcctctaattcctggtacagataaaattcatacagtgaactcctccctgcctcttaccatggattggtagagtcctgtcacttagtgcctggcagtgagctgcaggtgaaatgatcaggcccctaagccatccatgagaccttccatccatgctcctttttaccatctgccggtaaaatccaggggagaattctgaaatctgactgagataatgaatcaggagttcttaaacttaagtccctagatccccaagaggtcagtggatactggaatttgagagagaaaaaatgtcctctttaaaaatttatttttaagttttgcaggtacacagtgtgtgtgtgtgtgtgtgtataaaaatatataaatataatgggatacacgagatgttttgatacaggcttgcaatgtgaaataagcacatcatggagaatggcgtatccacctcctcaaacatttatcctttgtgttacaaacaacccaactacactcttgtagttattttaatgtatacaattaaatttttattgaccaaagttaccctgttgtgctatcaaatagtagatcttgttcattctttctaatttttttgtacccattaaccatctccacctccccccggccccctgctaccctttccagcttctggtaatcactcttttactctctgagtttaattgttttgacttttagatcacacaaataagtgaggacatgcaatgtttgtctgtgcctgacttatttcacctcacataatgatcttccattccatccatgttggtgcaattgacaggactgcattatttttcatggctgaatagtactacactatgtatgtgtgccacattttctttatccagtcatctgctgatggacacttaggttgctccaaatcttagctattgtgaacagtgctgcaatagatatgggagtccagatatttcttcaatatactgacttcctttcttttgggtatatacccagcagtgggattgctggatcatatggtagctctgtttttagttttttggaggaacctccaaactgctttccatgaaaaatggcctctttattgtcactaacctctaattgaaagcatttttttcattatgaatgtaagcaccaactattgtagtgttattggtatccacaactaattttctaatacaaatcagaaatacttattacatcaactatctcaaaatattatttttactcatcactactttgtaattatagcagttattggagcagctgaaagatcttgttttataatgcattgatacagaagcacacatattaccatattacaaatttgttgtatattttattcaattacaaacattattcagagaagggtccatagccacaccagactgtcaaagaggaccacggcacaaaaatattgagttgctgctcttggtggaaggagcttggttcctggatgactgcatggagcagagtcctcccttccaccaaagtcctgtcatcccacattgggctatagtataagcaaggaataagcctttcttgtgttatctactgagatattggagatgtttgttaaagccattagcccatcctgactggctgtaattaaccttgccaaaccctttaattgttctgagctttggcttccaaacttgctcttagaaagaatcttatccacacaggatggctgggaggagtaaatgggagaactggtatggaaatgcacaacagatgaagggttttttatggatcatcaagtggggctgctttttccccaagccagaggtcaacaaactaccatccacatgtttttgtaaataaagtttcactggaatgcagccacacccattggtttacatattgtctgtgcctgctttcatagcagagttgagtagttgagacagagatcctatgatctgcaagtctaaaatatttgtctctttaagagaaagtttgccaacctctgccctaggccttacttttctcctgtaagtgatggtggggagggatgcatggcagactctttatgcagataaaaagcctgggaggatgctaccctcctcaggctcagtgggatgcctgaagctgggcacaagggaacacacagcatgcctgccacctacgaacactgggccaactgaatttaaagccagaacctgtagcccctttgtcacttgcttgaactagttaactgtatcgatgcatacatgggtttgtttcctttgatgaggtaggccgacatcctcagatctagaaggcatgcatggggcagaagaccaaagctggtttgtcccatatctttgcagtggtacatcccttcatatcggtaggtagcagtgcagaagatatgctcacgcccagtctacagataaggaaactgagtcacagaggggttaagggaatataggaaggaaactaccatataaagacaagcatagtcaaagaatttgcccaccgtggtgtaattagtaagtggcagagctggaattgtaacctagcttgattccatgtccagcagtctatacaacccaacattgctttctccatcattttcactgctgttagtatcatcatctgactgcctttgtgtagtgtatgtgtttgccaagtatagctgtgacaaggctgctgccagaatggtctttcaagtgatacaagtcaacccttgtttatctctgctgttgaattgctgtgtgatcctaagtaagtcacttaacctctctgagcctcactccattcaactgtcacgacagaattgtaatccttatcttacctcactttgtaattgggaactcatttaaataagaaaggaaataagttagctgagtaaatctttcttttttaagtctgcactaaaagaaagttatttttctttgcaatattcacaaaactgacagctgccaaaattagcatctgactctttttatttaagtatatcttatttgcttgtattaccgcagcacatcgtagaatgatgtcctaaatgcccttccaacgctggcattacatctttctaaaccaacccttcttttagctgttgaagaaacaagcatctagggaggcaaaaggatttgctttgtgcctcctaggaagtatgagctgagactagaactctgatccttggttcctagggccctgtgttctccacactacttcactgactcctgaaggagggatcgctttcgtgatgatggttctctgagtgcagaagtcacacctaatgtgttccttttctttcagggtagatgtgcaacattaaattcaccagctttggcttcagaaagacctgggtttccatggtgcctctgccactgacaaaccatgggatattgggctcttttatttccctcctgcagattcttagcttctccatgtgtaaaacaagaataataatagcccttacctcacgggtgtcaagaggttaagtaagatgatgtggataaagcatgtaatgaagtccctggcatgtagtaacactataaatgcagctgttatcatagttactgttttagctgcccaacataaggctcccacatcaaaagcctcctttgtacaatttactcatggggcaggaaagaggctgtgatgtatcatcctgaggtccataaaaaggatgctaaaaaaacaagtcataagcaaccatggctatctgcccagttttataattgagaaaaacagcatcttagaaaatcactgctagtttaggtctcttgcttggaattactaaatgtgaatttaaatatgtatttattttgtgtgctggtgtcagcaagtgtgggtactgaggaaaccatccatatacactttaaacttcctgagttagatctcttgtggatgccttctttctggtcaagcgttggtattggccacttgatttaatctgcacttggggcagcctccttcctggccacagagctgatcctcaccttggtggctcccgagatccatggcaccacaaacccttactatgagatgtcttgaagcattaagctttgatgaaattatgcccaggaaacaggcctcttagccactgacagaggtcacaggctcgctggcttacacaaaaccaagctcttggcagagccctgcagggatgggagctgtttggggctaattagcctcattaagaaactgctgatgagctaatggaactgaaatgtggtcaccttctgaagtcacctagcagatttgcagcctaaaaataaagtaactttccagcagtttcccaaggccccaaagcctgtgctcatatttcttctaagaggaagtagtgcaggtgggattctctttccagctgggccagagcctagaacacggaggggcttccagtccagtgaataactctcccctctcttcctgttgcctccagactcagcctccagagctctactcaaatcctgctccctactgggaaatgtatgctctctgtctctgtctttctctccctctgtttctcgatttctctgtctctgtctgcctgttcctctttgtttatccccctctctgtctctccctttgtctctgtctctgtctgtccttgtttgagggtttactctgtgctgagttcccatatacattttctcacttaatcattataagaacctgatgaggctgttactgccattgttcctgtaatgtagatgaggcacagagaggttaaatgacttgtcccaagttccacagcttgcaagttgccagaatttgaacccaagaagtctgactccagaacatgaacctgagcgccgcccccccccccccaggtaatacccccttcaactgtgagttcttagaatgttgtttgcacctacacaatttcccactccaatgcgttcttttcttgtgcatgtacagtgaacctccccaactgacacacagtgggtattcagtcaatgtttgtcggatgactcatggggtataatcttctgaaggcaatgaacttgttttataaacctggggattcccctacccccccccccccgcccgccgattttcctgtacaaagttaagctcctagtttgaacctgttctctctttctatcagatagtctttttattgagaaagttctttctcatgtctagatgaaatctctgacgcacaaacccatttcctgtattctgaatcatatttgaaaatttccacttatacctgaagactacttaataccaagctactttaatagggcagaaaagcacagagcttagagtcagaagacctaagtttgactcccgattctgttatctattggctgtgacctttggcaattggctctagattcttgagcttcaattttctcatttgtaaaatgggcatactagtatctactcatttagagcacgtcccagaattagtgtgagggttatgttagataatacattgcatctaacttgtacatcagttattattcttaccacaaactggatgcagaagtgtttctttttggtagaataactgagcagtgatttattttggatagcaaatccagtagaaatcttgaggattgttaccccaggtggaactccttagtagaagagctgtagctgattaatttcttcaaagatccatgctccctccctcccttaattcctccctccctccctccctccctccctccctccctccctctctcccttccttcctccctccctccctcccttccttccttccttcctttccttcctcccttccctccctccctccctcccaatatttattgtgcaatgccaggtactagatgctaagtgctggatattcaggtgctagatgctgggtagatgaaaccaaatgaaaaagctccttcccttcatgggagcccacagttaaaaaggaaatagagacaggtgaatccctaaccaccttgaagtaggccaagtgccatggacaggtggaaagagggaaagtcaatattgaacgaccatccactaaaccttggaatcatcactgactcctcagtttctcttatatcttgcagtccatctatctgcaaatcatgccagctttactctcaaatacatcatgaatctgatcatttgtcgtctccccgcagctgctcccttggtccaaatgattaccagctctccccagaactaatttgaatagcctcctaattggctttcctgcttttacattcactcccatccagtctagtctacatccaggggtcaggaagaacttgtaaaaactgaagtcagaacatgtcactcctctgctcagagctcctcagtggcttctcatttcactcagtgtaaaatctgaagtcctcacaaggttctggataatctggtcctggatactctctgctctctaccttccacttatacctgaagactacttaataccaagctactttaatagggcagaaaagcacagagcttagagtcagaagacctaagtttgactcccgattctgttatctattggctgtgacctttggcaattggctctagattcttgagcttcaattttctcatttgtaaaatgggcatactagtatgacctgtggtcacccctttccagcccagcccacacacatcagcctccttgcttggccctgatgacttccagcacacactcacctgagagtttttacagagactttgacaccaatcctggcctagactatcctttctacagatatacacatagatcatccctcactttctttaggcctttgctcatatctcatattaaaaaccccatccttggccaggtgtggtggctcacacctgtaatccaagcagtttgggaggctgaggcaggcagatcacctgaggtcaccacaactagcctggccaacattgaaaactctgtctctactaataatacaaaaattagctgggtgtggtggcgtgtgcctgtaatcccagctactcaggaggctgagacacgagaatagctcgaactgggagggagaggttgcatgagccaggatccaccactgcactccagcctgggtgacagagcaagactttgtctcaaaaaaacaaaacaaaaacaaaaacaaaaacaaaaaaacaaacaaaaaacaaaaaaaccatccttgaccacactcactcattattactacctgcattctcccattattactactctcctgcttaatttttctggacatatataaattgtttaggtgtttactgtccttcactccattagaatggaatctggtttggttcagtatttctagtaactgtaacagtgtctggcacatagtaggtactcaataaatgtaagtaggaagaatgtgtagcatggtgcactagagacacataaaagggggcatctaactggacttggtcatgggtccctcttggaaatctgctctaggttttgaagaattgaaaggtgttaggcaggcagaaaaggagggaagaaggtatttgatggggggtccaaatatcatgtgagaagactcaaacgaatgaaaggtcatgattcatttgtgaaatttttggtgcttctagatggaatgacagccagaatccttctacaatggcctaaggaggagacacagccttactcaactgccctcccccacccacttttgctgcttaataatccactagaggttttatcaacagagagattttaaacatttccccaagccctgccttttctaacctgggcagcgctttatttatttacttattttacttttgttttcctttttgtgttttctctgatttttaacagacatcgaaagtccagatgaagaagagggatctttcctttctttacatgttgctgtgctgaaagccaacagccaggaaaggagttagcgaaatgcccaggcggtcacatcagaacctcagcaaagggccacatggctgggccaggacagatcagcagactccaggaagccacggtgggtgtatgcactcaagtcactgcagttcagagtaaggagcagccctccagttccagccaagggcgacggctttgctggtgtcctctactcgtggttggacgctgctttggaaaggaatcatgttcactttggataccaactgccaaggggctgctttccagttctgcccatcatttttactctcttctgcatatctgggttctcctctgttctctcgggaaggaacaggatgaagcctagttgtgctcactgtagagggagaacagggtggaacttttctgattactccattttccaggtctcagagccagagaccttcatgctcccacagctgaaccagtggatgatgacaactcttaagacttgaacactgtgtctgtgcagttagtgctcttagtggtagaattgttagaactgcccagagttctggagtttcagcttcataggtagcagcatagccatgtctgtgggtcccaacctgtcattccaaacttttctttttctagctagagcaacataaatcatttattaagtaattaggctatgttaggcattgtgacacattagacataactgtctcacttattcctctttataacctttctcaaagcttgtccttctttcttacccctctctgctgccatcactgtcactccaccctggtttatttttcttctaagcatttaccataactaggctacatgatatttcatattatttttactgatcattgctctctcaaactaagatgaaaacatcataacaatagagatgttttgttttgttaacttatattgcctatgcctcaataacataataggtgctcaataaatatttgttggtagatgaatgaacatatgagttaggtttcatggctcttttactgagaaataaaccaaacgtttaaaaaggagataaattacccatggtaacgtattcaggatgtggctgggatcagatctgagccaggatttaagcttgtgccagatgagttcaaagatctcatttaatacatcccttcaggtagtttacactctagcagggccagggattggctggtgtggggaagagaggcacccatctccctgcacaatttcaaaaggcaccaacattcaataatcaaaataaataacattgtaatgtacttaaaataaataacttgcaacgtgcttaaaataacttgtaatgtacttaaaaattcagaagttttaatgccaaaaaccctaggatgaacaaaactttaaaactttaaataaaggcaagatcagtcttattgatttttcccttttgcctcagacttcaatatggctcagaccagcactgatctcatccttgtttaaaacgataacaccctgaccccagccctgcactctaatcatagttatgcgttgaatcttttattctttgggcatttcctccctccaggcctttgggcaactgctcctagactttgggatatcggcctcttgaaatatgtgcacgtttgtgtgttttatctatattcttaaactatggtggactgatcatataccactgtgtgacatctctcactgttgcttcataaattctgacttcctcactttactaagcaatggccatttgcaggcgtggccttggcagcggtgctggctagccgctggttcggtttgttagtaccactgtctatactgcctgctgtttaactttcggatcattttgttgcattttctttattatttagtgatcatgagtggaaaacaaaaatgaaagagctgaatctagcaagaggaagcgtaagtctgccaatctaatctaataggaacaaaaatggaaatcattagccatgtcaaaacaatgctttctcagctcaatcagagcctcgctgcattttcctgttgactgtgtgtccacatgtgtaagaaaagaagaggattaaagaatgcataaaactgctgaaggtatattatcgaaaactgtgtcaaaagctgaagttaaattaggctttgatgcttttttccttcttttttttttaactctgctgggaccatctttgtaacattattaaaattattaatgtagaatatactctttaccaggccctcttctcagcactgctcatgaattaacttatgtaatcccataagaaccctatggggtgtgaaccttgtctgttttatatgtgctgcctattatagatgaaaaagcaggcacagagaggttaagtaacttgcccaaggtcacacagctagtgagcatcagagcacggacttaacccagttagtctgacttcagaattccatcttttgaaccaggaacaccaaacctgttacacaacatgtacatcaactggacttcacatatttcacttttgcacgtttctgttttcaattgcatactcattacatacaaacatagtgtcttgcctatgactctctcccatttttgctcatcctaacctttgccttttctaaggctcagataaaagctacctcttccatgataaaggaaacacaacaaaatgattcgaacgttgcacaacaggcagtatagacggtggctcggacagactgaaccagttgccttccctgatactccaagataggacttctgtatcaatcttagcatgcccatatgcccatagcacttaatttctcaattttctcagcgtactttattgttctttcactctacgcacttataatctgtcttaatacattgtgtgtatttcatctttgcattgtgcaaaatagcaatggtaataactacttgctgaagtgggtacagaggaatggggcctgcccagtagaatggcctttcagctcctgggaggcctgaggtttctgtggattttctatgacctttttatactgcggatggaaattataaagtgctatatacacgtggaagaactgaagtgtactatctactggaaagtgaagcagcaagtgactaatgacaacgtcctttcatggagatgacccttctgggacaccgtcagcaaagttcatcattgacatggtggaaattgcaccaggttggttccgggaaattctgccttcaggttccaacgtgacctttccagctccaacgtgaggaaagcagcttcttcttgtgtaaaatatggataattactcctgctctgtgtacctcacgggctgttgtgacagcaaatgaaagatgatatgaaaggacttcataagctatgaagcaatgaggcagttggaaggtgaccagattttccctgggtggatttaatcatgcttaattcattttccatgcatccttcagagccctgcttgtgtggacattcagagttacccctagctcctgcctccactctttcccacctgtttctcctctgggaggccggcctttagggtcagcagtggctcccttactctcaggctgctagttgggtttggccaatgaggggccctggcaggagactggagtgaggaaggaataagaagccagggtatttattctattgtcctctccctactcagggtctcattggtctggctatgtccctcaactgaggtcactgctgccctcaaggcagccctctctacctagccctctcattcaaatagctaaaggcagtgacagccagtgctggacactgcattctccctgtggtttctctacaccctgcacacacgtttgcaaacagtccctctaccaaactcgcctcaagttctcctaataagtgctatcatttcctactgggaccctcatgattcatctcctcaaggttttactttctttatgaggccttcctagcaaacctggacccagcagacagctactccacctggcactgaactcaaagctctcaccgtttttaccagttttggcaaagtgaataccatggaacattcaatctaatggatagtagtgacataaaaattattttccaatacctttgggagacacaaagttaaacagactatatcactaccacccccttttattttcaatctgcaggacttctcagagcatttcatttgcttttgtgcatactatgcaccactaggagagaaacacgcacacacacacacacacacacatacacacacacatacacacacacacaattaaactgtaagaagcctattataaaatgtatcactaaagatgttaaaatgtgaaaaaatgttggtcttagaattgatggaatatgataacatgtagacattacaagctttcttacttgaggaacactttttggaaagaaaatctcacagaactagagctttagggacatattttggcaaactcttacaccttttactagctaacagcatacacagtgtctatatatttatttcatgattgcattaaagtagctatagatgattaatctcttgctggcaggtaatcgttactagtcccatctttagacatagagttaacacatcctatgggctctgtgagtacttggtggttgaggaggctctgtggcacagactggctagctctttaccaagcctggttctgtttcctcctgtacacaaaatgaactgcatctcccagctttccttaaacttaggtttggccatgggagttctggctaacagaatgtagtcagaaataatgtggaccaccttcaagcctggcccataaaactctcccctttttgttctcttctctcatatgctggcaggatgtcaacacccaggacaaacttggaaaccttgcattgaagatggcagccacttcttcagcctccatctctgaatacatgaacttccactacacccctcttcccattgccactgtttggacttagagtgagcaagaaataaatttctactgtacaaagtcactgagattgtagaattcatctgttactgtgtctggtgttgtacaaactaacacagcctcttgtgactagggagttaggaggtctaagggggtggcctatggctgggcactgcagacagtggttttcgtggaggttatatacagccttggcctcttcaaactcagaacatctatctgcacccagtcttctctctgaagtctcccacatgtcctagctagtctggatattctcttgcccattcttcctgctcctgtgcacataactgtatgcaagcatttgttaaattgctttcatttctctgcatacatgttgatcttcctcctctgaccatgagtttcatggggtcagagaccttaatgtattattgtccctactcttaatgttttatgtggggcttggcattgggtagatactaaaaaaaaaatttactgaatgaacgaattcctaggacttattatagccaaaataaggcatcccaaacttttactttcccacatatttagactacctcccagtaaattccaccattgaaacaaatataaaaactaactcaagacactccaagaggaatcaaagcttcaagaacaacaaacatggaaaacaaaacaatttttatgctcaaactttccagtagggtgctgtcatagctaaatgcattttgttcatggaataaatctttcaaagatttactggtaaacatttatgttgagttgcttcatcttttttgtctttttctcattaataatatgtgaataataaaaatacctcattgatatgaagagttatgttaaaatagtgcatggcacatagccagggctcactaaatgttagctattttcattacatcacaggtgaagagtttcattccgtgattttattaagatgtctggttgttacttaagtcagtaaaccaccccccaaggtcagttccagctcatagcctgtgtttgtatggccctgcaagctgagaatggttgtcatatttttaagggataaaacaaaaaaacaaaggagagcaaaaaaagagcatgcctaaaatatgtactgtttggttgtttacagaaaaacgtttgccaatccttgcctaagggtaacagctcaaagactgcccccatggatgtgtctggaatcctctaagcagcccattgcagcttccctgcagtttcctcctttaatttttaaaatgtttgaaatctttaccaagtccgtagctttggtggctgtaaagattcattatacgtatggattgtccaagctgttacagaaactgaacagtgaggtgctgaggctgtgttccatgggggttcaaaagattacccctgtgacatcttgcaaagacagtgccatgcaaatgaaggcagccatgaggagctacgttgaaaagcttcatgctaatacttaggaaaaggagtcatgagggacgtatgcaattgacaatcagtacagccctctaagcagaaagaccacaaagggaaagagaagggaaagtagcatttacttaggtacctagtatatgccaggcatgtgctagatgccttctttagcatagcagcattttaattctcatacagtccagtgaggtgcttataattatcaccccagtttttcaaacaaggaaactggtttgagcaagttgtttgctcaatcaaggactcattcaaacaggattggagtccaggctaggctgatttataagcccttgttctttcctagaacataaggtgtttcaaactttgttatgaagtttagaagtagcccaacccacagaaagaaaggggtcaatatagacataaatagctcaaaaggccgggcgcggtggctcacgcctgtaatcctagcactatgggagactgaggtaggcagatcacgaggttaagagatcgagaccattctggccaatatggtgaaaccccatctctactaaaaatacaaaaattagccgggtgtgttggcgcatgcctgtcatcccagctacttgggaggctgatgcaggagaatcgcttgaacccgggaggcagaggttgcagtgagctgagattgcgccactgtactccaggctggcaacagagcaagactccatctcaaaaaaaaaaaaaaaaaaaaagaaaaagaaaaaaaagaaaaaagtcaagagagtatttacacataggtgactgagcatgaagagtgcactgggatcccagaaaagtctctgaatgtaggaatggataagattcctgcacagtagaccagggatgcctttttgttctctctctcaatctctttttctctctctctcagatgtacctgatttagaaaaagtattggacttaaaaaaaaaacaaacaatttctgagatccattccagccttacaattctatgcttccatgttttgtagtttctattgtttttattcatgaagagtttatgatcagttgatgccagaaagttgcaactcttgaatgactttaggaattcacctcattaaatggctctgtcacaaccctgagcttgcagggtcagggcccaagtgttccagggatagaaagctggcatttctgcttcagcaaagaggccaacatgcagcctctctgcttacttaacacctgacagaggggagagagagacacgaaacagaatacttgactgacactggcttaaggaatgatgatgtgtttgtgtcatctagtagatatttgccatttgtggctgctccatatcttccccatattttagttaaatctcatattacaagtcctccctgctcaaaaacaggagactagaaaactggtattttcagactccttcacagctagaccacaggcctgaacttgggttctatttttgccattgaaagtaatggcaaaaactgcagttacttttgcaccaacctatatcaatcgaatatacccatgtaagacttggattcatgagtgagcaatgtgagggggtggccatgtgtgggcactcactattctgagattcatcacggaagaggctgctacttcttccaaggagccaagcagagcttccagcattccagcacgtgcagaactggagctgagagcaatagctctgatggtaatgcttgcattgaaacagttcccatggcatggttggacattgttcttgtctctgtagttttaaagcttggctctctctggccctcatggagagtctgcaagtcccctaacatccttttaaattattgttttttaaaatttgaactagccacagtggaagctgtttgcagttcagattcctgactacagtggatgctgttgtttgcaattcagattcttgtcatgtgacaagaagtatggggcaggaataggtgatttcagggttgctgtggtggctcaaagtatcagtaaggattcagcctctatcttcccatgttttgtgagtttactttttatcttaaagttggttgtctaaaggtcactgtcaatgaccaataagactatcaatggctccaagtagcacatcttttcaatttatttttccaagaagaaaaggaaaacaaaaaagaggaaggcatcttcaaaatggattgttccaaggagaaaagaaaaagcagcagcagcagcagcagcagcagcagcagcagcagcagcagcagcagcagcagcagcagcagaaaaagaccttccttccaccttatttttcactgactggacagggttataaggtcaccgctagttgcaaaaggatctgacaaggaagaatgtgatagtcatggttagcttagaccaaccatgctttattacagggggcaaagacattcagattctactattaagaaagaagggagggaaggggttgctagataggcaactgatgcctaccaaaatcccactccaagcttgctccctcgttgacaagatctggcaatgggactccgctcctagaagagggagatttcctagaagattcccattcctgttttccccaggccaacttctaggtgcttcagggccttcagttgaacccattgtcagagagacctgggtttgaatctggctcttccacacccccagtgccacctgggcaagggtttcctcacttctctttcttcatctgtaatgtggggatagcaatagccctgcctcatggattgttgtgaagactgaatgctatagtaacactcaattcctgaacatgataagcaataactattttagaaggaggaggaggaggactagtgtggagtattctgatacatagtccttctagggagggtgactgacaacacatgtatataacccggtaattttagaatagaggtagttgataccatgtgtaaggtgagggtttcctcagacatgtgcttacaggtgtgttgcaaaacaatgttatgtgcatcagcttatttaatctcacataacacctttatacaggtgatgactcaaaggcttaaagatgctcatgatggatctgaaggaagaatctggtaagtgttgggcagaatcactcatccagttatacctgggctctttgcattcaacctcagtacctggaaactgaacaggaatgtcagtagcagattgcctgatgaccatcgaggatttatctggagaaaaaccaggagctttaaggtgattttctttaagtatcagcagcactggcttgtgaagcagcaatttcacatatatgtttagtctccagagattgaagataaggatcacattactggagataaattttgaacaacacaagaaaggacatggggtataagctacgcaacagtgaaatgagtggccttggggagaagtgagtttcctatcactggaggtaatcaagcagcacatcacctatagaggtgatccatgcttcaaatggaggcagggaagtatgggtggaggcttctgaggttcttttcagttctaagatccaaaattctatgagagctacaggcaggtcagcaccagccacacaggagtttctggaatggatggagaggcccttccagctgagaggggtgctgaatttaaagaggccctctggaaccaaacacaggtgtagattcctctgctcttcccttagtgcctctgctgggagaatgacgatgaagtcctccaggtatccaggcttctcccttgagcattagtgagagtagcttgttctgaaaggggagccggctggccattctcactgatggatctcaggaatgtcaccaccctggaggccaggataaaccaatgcatcctgtcctcttgtcaacattctttccctccaacatgacacagattaagagcttattttccaacagcctttgatgcatttttaaacatttaccctcaggattattcctcttgttctcccaacttctagccagctgattaaaattctagctcaattgaaatactctttcaaagtgggccattcagaattaagcaaaaagcactgaacttactagaggtctagcacttttgattaatctttaattaatacttcactttaattttcaatgctacctttaaaacacagagctgtgttcaaaccacaaactcattatcttatcattttgaaaggcaggactgtctgtcagagtataagaaaagggtactgtgtagtagtcttttcctggaagtcagttttgtaaaattttcattgatagacagtagttctgaaatatgtatatatatattagaaagcaaccatcttccaaaagatctaaagaatcagctgggagaaaattatggtaacacagggtaaaataatattgtgctgtgttgacataaattcatctttgttatttatcctgatgattttatctttttattggtgtatcacattgctgaaaatatggtttataatttaatttccactgccaagtacggagaagccactggaggcactgtaatgaggaaagaatagtcatggtacgaccatggaaaaggatgcgaagatgatttatgtaactttcttttcctatttacagtttattaagtcactgtctttttgcaatggccaagtgaaaattaaagcacttcagagaagaacttggggttcagcatcattaggggaagaggaatggatgccttgatgaacttgactatagaaatctatagagcacaacttaatcagccttcaaattgatcttggatgctcaaaagcaggtttaagactgaacaaatctttaatgcatatcctttccctttgaaaagcaacatatgatgcatgcatgagaatgatttagagatttttcccagacttcaattcataaagtaactgcatgtagcactttttgggatttcatgggaaaacaggaaaagaatggacactcttcatggacctgcctccttcctcagattctctgttcatgcccctgaaagacatcatctgtacaatggcaattacttagaagaaagggaagtcgcttgttgtccaaatgatcataataaaatcgagccactaatgttccactttctctttaactgcaggttcagagatgccagcagactccatgctcctgggctggcaaggagctgtgaggatcatgtagcacatgatctcccttccccatgaggagcagaagcttccacatgaggcaggtgacaaagtaataaggctttagtgtcacacaaatgtgactttgaacccatacttctccacttactgtgagtccttgagcacgttgttgaaattagttgagctccagattcctcaactgctaaaaggtgccaattaaacttactttatatggttgtcgagggaattaaagatactcattagtggggactagaggtaatggcaaccatcctagtgtcatgcaaaagcagactttattgggcaaatttatgggcagaggatcagtatgacaattctattcggtcctctgacagacaacggttcccaggagctgagttggccagatatagtgtgaggttgtgctctgggaatgggaccaacccttccctgctactctagctgtatataggaagaatatgagagaattctcaaaaaagcagcaaaagcaatctgaccttgtgccccggctgctcaatggtgttgtagataaacatcttgcaactggacatcagcttctcagggaggtatttattcctagactgatgtcagcccccatttgcaggtagtctaagcccctcccactggaagagttaagagttaaccacagagagcgatacatgctgggtacacaaggtggggcagatgctttcagcagcaggcagcaaggttggcattttagtagaggctatgccttggagtatacggttgagaagagagaccactttcccttgacccatatattttgtgagtcaagatttactttgtggcacttcagcggtggaactgtggcctgctgacaacacagctgtacttcttaaacatcccagctatctatggcttgccactgccattcagcaatcaggctttcctcctctgctacatggtgagttcagtataggcactgaaagcaaactagcagaaggcaaaatgaaattaggtttctaagaaaggcgttgttatctttcgattcaacaaaataaacattcacattgtacctccttggtgccaagaaatggagcaatgggagggggtttaataccagcaacaataattcctaacagttattgagtttgtctgcctccaggcagtgctctaagtactttatgtgttttataaaaaaataacatataacacctgcctttgatttaagtgggaagtcagctacttaaccaacctaataggcagtgctagtgctcagtgccataagagtgtaatagacaaaatgctactgcagcagagaagggttgcaaggaaggtcagagaagatgacatttgagctagaagggtaagaattagccacatagaagaggaatggaaggaagaacatgaataaaggcatgagatggaataaagccatgataatggtgttgatgatgatggtgattaagacccaagggcaaggagaggaaagagaaggaggaacagaaaaaaaaattaaataggatgtaacagatttatactctcagccatcatcaatatacctgtcagtgcaggtttatgtttccatacacacttttcattcatggactgggaagggactgagaagcaaacacaaataggactacaacagtctttgttgacttggccaaaaagcaaggcatcctgtctataggctaaaggttggttctccatttctcactgccattttaggtaaacacactcttaagaaaaactgtcattactcctcttgtgatctttcttccaaagaccccatgaatcctttgtaaatttggtgaggtgctctatgtaaaagcactttgagaaaggtagcaggacccaacgtggaggcaaaggcagtctggtaaagaagtcaggtttctcctttgcagtgagctcacaggatggaggcagccatggccaagctgtctaagggcagaggtaccacagcacaggcacggggcacttgggtaacccaggtctttcccccactcgcctgtggggagcccccacccttccccaccaggtagtaaaggctctgagagaagaaaaagacatgggttcatgcattcgcaaatgcttaacatttgtgaagtgccgaggccaagtgatttggacacctttgttaaggatctctcagtgtatgaggaaaagagacttgtaaaaaaataaccgcatataacatgttgaatgttataaaactgtgatggcacaaaggagggaggcaattgatggggaggggtttgatagggagggtgtgggtacagtaaatactccccaaagaggaatatacttgagtataagagagagaaaggagcttgttatgcgttttaattcttagtgtatatacttacctctttccattggaaggttttacttggcagggcataaggagtaatgaaggagggaaagggggtgtaaggctggggagaaagaaggatgtgggagtgaaatattgtatgagcatttataatgccataagaaacaatatgtatacattgatttgagttcagacaacacacacacacacacacacacacaaacacacatgcacacacatacacacaacttgggaaggtcagtgaaaagattgaggttagtgctatgtaagctccaagccttcaggaagatcctccaaggaagagatcctgaaggcaaaactgagttagcgggcctttgcacagctttcctttgcaagtccggtgtccagaaaatatgaacctcctcttttagcattatcctggtacctgttataaaagtaggaccttcttctaccaattacagtggggatgacgtgagggctgacatttctgaaggtctaccttttggcaaattagatggatggattaagtacataaaatttcatgtgattctcatgaccacattacgatattgggtatgaaaggctagacccatttcactgatgtctggaaattatggcttagagttacgaaataattatctgaaatgacattggtggtacaagtcaggattggaaaccaggcctcctttattccaaagcatttgtctttcccactatgcaatgtttccctgaaagcattagctggaaccactgcttcatcagagagtgccttttgtttgtgcatgatcaaatgtgaaaatgtaaaatattttatatatgccaagtatacctatatgagggattattatagttatttgtcattatttcagtgctactgaaagctttccattatttttaacttttaaattttatttttgagtcaggtccatgggaggctagatatttggagtttcaaatcagttaattacctaataaaaatgcaatataacatctgctcttcaagttaacatttctcctggtcaagggcaaatttggatgatgaaagcatttgtacattctcagactctgaaatccttacagtgatatttatcaccactgatttaaaaattggagggcaagtgtcttgaagccttttatctttccaacgtgtaattaattaccttgtttaaaactcttatgaagtaggtggtgcaggtattatgatcctcatcttacattcttccactaattcattcattttacaaatatacattaacagatttaaaaaatctaagccccagggagatagctgatttacctctaagtcaacagaagaagcaaatgacagactgaaatcaagattcctggctctgcgttctgaatttagggcatttctactaaaccatcttgcctgagtctcagcattaacctatgtcttttgtatatctatccttgatatcttaatgttctggcatatttcatatttctattgtagaaaagatcctgatggaaccagtagcttctaaatcaacacacatttgcctccaaccccccacctccatgaaaatgtggttcttaggactgctgtagcttcagcaatcctgagaaataaatgtatgaagtggcttgtgcactaactcaactacaggggatgggactgctttaattgccatgaggcgctgaatgcagttaacactcagaggaaaagagccttgtttcttggtttctttgaagactgacaattattttatggaacgacttcatgcattatcaaaacttccatagaaattcaatgagacactgcatagtaaagcaagagcccttcccctttacatagcaaatatctctatatacataccctgtacttctcaaacacaaagaagatcgttggaaaacacacagttatgctcaagggagcctgcagattagttctccagcacctcccatgaccctgctcctgcccttctcatctccacttctcctatcaaagattgaatcactcctactcatctaccatcattgtgccctttatagactctatgaataataaagctattttgttttcattttttattttctttcctacaaaatcgtgtgcttaccaccaaagtcagagattgattttgttttattttcatttgtagtcttgatgtctaacacagtacctagcacaaggcaggcactacacaaaatgtttgctggaagagacacaaatgcataaaatcatggtttccatccttagtcaattgcatgttcattgttaagcaaaagaagcaacaggctttgaacatatccagtgcttccctaccatgtgcagaatgttgtgattaagaaggcactaccttggccgggcacggtggctcatgcctgtaatcccagcactttgggagtccaaggtgggcggatcacgaggtcaggagatcgagaccttcctggctaacacggtgaaaccccgtctctacttaaaatacaaaaaaattagccgggcgtggtggcatgagcctgtagtcccagctgctggggaggctgaggcaggagaatggcatgaacctgggaggcggagcttgcagtgagcccagatcgcaccactgcactccagcctgggtgacagagcaacagagcaagactccttctcaaaaaaaaaaaaaaaaaaaaaaaaaaaaaggaactactttgtagaagaggcagttaaaaacagaaatgaagtaaaaaattcattgattgattcctcagatattaggtaagtactcattctgctccaggtatgaactgataactagacatataaagtaatgacaggggaccctggaggggcttatagcttggtagagagattggcctataatcgactaactaaaataaaccaaaatcctaaatggaaagaagactgaaatataaaattagaaaactttggaagagatgcaaatatagctctggcagaggaatccacatgaaaatcaattccaggaatcagcaacacactgctagtcaatgagcaatgggtctctaacatttagataaagtgttactcggtgtcagacattgttgcaagtttcttccttctattgtatcatttattccttacacttacgctagaaagtaaatactcaactccttttacagataaaaactcgggctcatgtgcataaagtaaatagagtatagtgtttaagtatacctgttttggagtctagcataactagatttgaatattgggtccataacttaactgtgtgaccttgaactaatcatgttacgcctcaggattttcacctgggaaagtggataatgatagtgcccacctcactggtgaggcaggtgaagtatttaatacggaccccactaagtgctatttctttagtttgagagcacactgctagcaaggatcaagatagggtttcacactcaggctttaccacagagctcatgctgtttttactgagtttgttgcctttctgggcaaactggataattgacatgcattcattagatatctgatgtggacaaaaaggcagaatgcagtacttctgattgcattatattagggcatttctgtcccaacaatagatttttgtaatgtacttgaactctgaactcaatcccaacctttaatacacacacacacacacacacacacacacacacacacacgtactatagtttcttatatctataataacacagagttggtaggtgatagatagagggagggagaaattaagactctttcctgtgtttttgactctggagagtaggtcttagcttgaggatgggaaggatgatgatttcagttttgaatatattgagtctgagattcccatggatcatacaagtacagaggaaagtacaaatggagaagctatcatctctaggaaactgactatgagcggaaggccaagaagttttgagtatgaaaatacgatatcaaaaccacagtgaaaaaaagtgtggctgtggctacagatatcttaaacaaaacagaccagcattgaaaccaaagcagtaacagaggcagacttcagggagaacaaactcacagtttatcatttaagaaacagaaagcaaaccagagctgagtccctttcatgagacccatgtgcttgctcagaagcagagctgaagtaatattctggaaggctaagtgatgggagtagggagagatggtaacggccttcagttttatcaaccaggtaatcaggatcctgctttcctggagagaaccagtttcttatatgccaagtcccttttgtttacccataagaaagactagctcttttggttccttccattccctttcctacagcagtatgtccagacctcaccctcccacaccacccttaagccttcattcatagttgccatcttcagtccgcatgtcattcacagttgccatcttatgtgactgtgtgtagatacatactgatagttaattttcatagtcccctttcctggtttcatggcctccacacacagctatgacactagtattgtctctaactctggcagcatcttccccagtaaaccagtgtgcaaaagagtgcatcttctttgctagtgacattttactgactggtgctcatggcagtgtttctggtgcacatctggctcctccacaggggaatttccaaggtaagtgtgggaagacaaacctgcaaataaactccaataaataggataaatagcaggatgtatgtacaaggtttcaagagaaattggactagagttcatttcacttcaaagaaaccttggttagtcttcaaaatcaccaagtaaacatgggcagaaactccctccaagcaaagcacacagtatgggttgatttattattttggctactttttcaaaccgctttggcaaaaagagcagaaaacctggacttaaccagcttaaatttatgatttattgtctcccagagcaaggtgtccacaggtcaggaaagctccagggagggtatattaggaccctgactccacttcactgtgaccctgtcttcctttccaagttttgcttcatcagcagttccatgcatcatatccaggcatgccaatgacaagaggaagagaaggggctgtcttttccttctgcctctttttaagaccaaggaactatttcccataaatgctctgacactttctcatttcactggtctgaacaaggtctgtgtgcatagctctaaacccagtcacttataagcagtatgggattcctgtgatagtctgagactatttggaatttgtcccccaagagggatagggtcatgttttctgagagggcctacctgaacaaaatcagtacttcatcaatgaagaagagaaggtcagattttaagtatatagccaacagggtcagctacagttactatctacatataacacttattttttttaaagagaaaaaacaaaaacaatcacaaaggatgctgttagaataggatcaggctcaagaagatacactgattctgggacaaggaactctgcttatggatggcgtgacacaattatagagaaaatctgaagatctaaagaactggctgcctgtgagcaacagctgcagaaatgtaaaaatatatcctgtttatccattaaacactaccgagattgagttgagcactgcaccatgtcagataactctgtgttcactatcagaatgtgtgcagttttagagtgagcagtcattatatgttacatcatgcgcagttttgaaaagtcacggtcactaggtttacttgttggaaacatatccttgtaaaagataaggcatcgttggcatgaaactctctttcacatatacacttacacagagaaatatgtataactgatcatttatttttctttcatattaaaccttttttttttgcttttagtaagagtcatatcaatgaaaatggcaacatttagtctgagaaagttaacagtatatggtatggaacaacacaacctgaccccatatcttcagctggctttcagttttcataaatgaacttctgagagacaactaaaaattcatttctggtgcagaaaaatgtgcagaatgggaactatgcagaatgggttaattccagaagttgaacaaggggaatgcacatatgcaggcttattaagttatgtgcaaatgataagtacagtgaccatctccattgctaaaaattcattgtgaatgtgttgaagttgggattgatggagatactgaagtgatagccaaaattcacccagaaacaagctaaagtgaaggttaaagaaaaacagctgcagaagaaacaaactgtggagacatctccagcagtggaagcaatctgtttttgaagacagcgaggaactccaggcatctagcacattctgaatgggtaaagtcggactggagtgggttgctgtgggaaggagccattctctaaagaaaggtagacagcttctcacggctgggcctctaatgttaggctcagaaaacttactaagttgacaactctctaattacacagcctttgaataaaccgtgacatttataagaaaagacatcctgtcatttatttttgttacactggtttttgccttgcacactggtttaagacttcatgggacttttgaagaacaaattttagacctctgctacagggcaggttaaaatggaatcatccagttgctggttgattttttttcccccacgtgaagtctcccttggaatcaaggtaccagatcttctcttggttatctgaaatgatgtgtgctcatcttcagtgaagaagttcatgactcaaatagatcctagtaatagtgtctaattatatatgccaacctttccctacagcaatatacttcccttcaaagtaattctaatattattactttttttggtattgcattaaagaagatagaaagattttaatgctatctttaggaggatagaagcgtagctgtagaaagaagagaaaaattcagggagttcttattacctggttttcatgattagagtctccacagttgcaaagttttacagaaaagtaaattcacaatagcatgaaaatagtcatcactgaattgaccccttaaaaaatcagtccccattcaaaatcagtctcgacttaccactggaatcttagtcaacatcataactgatctctcaccaatttttataaaatagtcttataaaaatgctctgtaaattgattataaggtaaatttttaaatttcccccagaaatgggagattcatgaagtttaaaaaagtgatgttgaagaactgctggaatcacacgcagaattattgatatgatgatgtgacagaaacattactagatcttatttgaagaagaggaaatttttaaggataatgatagtttaggcttccagaagagaatgccatgaatcccaatagaattagggaatattgataaaatacttgaaatttgtaaaataaccctttttgtgatgttgagaaagtcaaaattaagtaaagaatatgttgtgaaatcatgtaatttttattagaaaaattgtaacaaaagttgaaacatgacaatttatccttcaagaattagtgaatagttatatttattacctgaaatatttttcaaatttaagtaaaatatactaatttttaaataaattttcaatgtaaaatccaagtcaaaatattttcactcatctttaaatgaattttggttttcattttaagataactcacttaaaatagcgttttctaggtatccattgtcattaaataacatggaatgtctgtaaatattcttatctcttttcactgagccatacaacctcacatgagactagaaagtcccagcataacaggtttctggaatggaagtgtaacactgtgcttgaggtagtttcaaaatatgtccacaaaagaggcagagcctaattcccctcttcttgagtgtggcctggacttacgacttagtgctaattaataaaacaaaacagaaatgatggtgggtagagtggattgcatagaaacacccacacccaccgcacaaatttgatgtccatcagaacctcagaatgtgaccttattaagaaatagggtctttgcagatataattagttaagatgaggtcattatggctggccctaatccaatgactggtgctctcagacaaagagatacaccgacagaagacagccatgtgaagatggaggcagatattggaatgatgcatttacaagccaaggaatgccaaggattgatggtggccaccaggaatgaggaagatgcaaggaaggattcctcccctagaaccttcagagggagcacagctctgctgacatcttgattttgaatgtttcacctccagatgtgacagggaatacttttttattgttttaagccaccagtttgtgtcactttgctatggcagccctagaacatcagcacaggagatcacttcaaagactgtgatataaaggcactgcggctttctctgtgctcactctctcttggatctctcactccagtggaagttggctgtcaagtcgtgaagatattctagcagcctgcagagaggccccatggtgaggaactgagccttctgccatggccatgtgagtgagccatcttgaaagtagaccttacttttgtggaaccttgagccagaaccccagtgaagctgcttccaaattcctgatccacagaaactgtgtgaaactaaatattgttttaaaccactgagcattgacgtaatttttatgcatcaataaacaactagtacagtcccctttgttccctcagatccaatttccccaactcaaaagtatactcaaaatgcactcagcattgaacagatccttcttctcctaaggctctgataactttttataactttatttccactccttgtccacctcttttcctgacaggataaaaagtgggcttctttcttgcacagaacgctctgtcatataggcccatcatctctgatatgtgaagattctaaataaagggcgactggcttctgtgaatgagttttattagttttattaccttagatatttcaaacgtgatctgaagtttctcatattcccttgagaaatgctcatggacatgaatgctaacattggcattctacccagtaagctttagaggacattcaagggaattcacatatctatgtgaacagctggtctctggtctccctgatccctcgagagcccagtgagggcagcttgctgctttaacaatttttccagtgaggaagggagaggatacctcaccatggagcagagaaaatggaagcacttacagacataccacaggtctgcaaaggaggcattggccttttgcctgattttacccaaacttatcaagtgcctgccatgcactgggcacaataagttaaaggcccatcattatcaatcaggaaccaccttccaggtgacaactgcatccatccaatgttgaagaaggaaaggtcagagcaggagaggagaagcaaatccatttatacagcagcctcagaactgcaggatcacaccccttgggtgaatagacaagctctgatgactgtctgagtgtggaaaccctgagctggggctgcctatggtcagaaatgccagccaatcttatgtgccccttgttgcacaatgatctaagtgctttacaggtattagccctggaaatcctcataacaatcttaacaggtagcaactgttattatcctcatttcacaagtgaagacactgaggcatagtaagaggcaaagctgagtttaaagctgggcagtctggcttcaggccatgcccctccatattaatctctccatagtcttttgaatgccagcaaaaaggatgttttactctttactacatctgatttggaattttgataaaaatgacatgaggcagaatttcaagccttttaagcaaatcatgcaagtctaatgctgtcgcgcttgctctaccgctgtgggctgatttgtgtctgtgctgggtagatatgttttagaaaagtacatgatgggaggcaggctcagctgttttgcgatcatgccctaaaatggttaggaagccagtggctgacagggatcaatgtagcactgtgaacaagtctaaataaatgttaatgtaatattttgggatgaaattaattaggtgtgctgatagttgcctgatgaggtaggcagatcagtatgatgtggaataatatggacagtttagtgttatataataaacccaaaaccatcctatgacgccctggatgacagctagggaatctctggagctcaacatagattttctttaaatagaggctggtaactaaaagagattctgagtctcacatcagctgcactgcatcagccctctttccttaatctgtggttccaaataattttgtaagtagataaaattctgaacccacccaataataatataaccagacaactaatactgcaatcttccctcttgcagggaaatcgctccagaaggcaaatgaagtagtctcctttttaagcatcctctgcttttctgttaaagtttgtctcattgcaggaatcacagcagcttttgacagcctgggggtggtgaatggacttctggatatttggagaatgccaaaatcctgttatgtctgttattgcagtgtacccttgagtacagtctccccaacttttttcaatatcatggtcacttgggatatgataataacgcatatcatctaattccaaaatgcacttctttgcatgataaaatctcttaagttgggatatatcttacaattgtgagcaccttacaattgctgtcatcttggcagcaggaacatggtacataaaatcatcctgcttcttataatggcaggaatcagtgggatatggtatttgtgcagcatgctggggtaaatgcattaggcttcatctggttggaggcagccttccatgggtctctgtaaccaaagcttctagacagcaccccttggggactgagaagctcaatctctcaggtgcctctgtgattcatctgtaacaactcaggagtgtgtcctgagacttgtctcctcaagtctgagccaccctatctgtgaaacagagatcagaacagcactttccagacgagaccttttggggaccttctgcaactttatgtgcacaaagtacctttcatataatctgacatcaaggaatttcagttactgctattggctttacagagccagggctaggttaaggcaattgaggcattcaccttgggcacaaaatttaagaggtgccaaaatctcagtgattgagataagtaatattttcatgcaatatttttaaaagccaaaatcaatgcaagaaaggatgaaaaaataaaaattttaaacagagacaggatccagctcttcatttggttgatgcatctcattgacttatcctggtcttagtccattcagattctgtcttgaatacttcaaatattgcattaaaatgctatttatcttgattactaagtttttttggtgtccccttaaattttgcacctgaggcttgtgcctcactcctctcacactcatgactctggtgatatttctgatgcatctgatgattgtttctaattgtgcctaaattggtctgatattaactatctgttgactcatatactcattcagcaagcctccaatctgttccaggtgctgtggcaggcaatggagatacacagcactggcctgtggagaatgcacataagcaaacaaacatgtgccatatattctttagggctgtcgtgaatgcatctattcattgattcactccaaaatgttcagcaagcacctcctctgagtgtgcccaatatgagcctgggacaactggagtcacaggaagaaaatagtcactatgtgagtcagtgtttccttacaaaacatttatagtggccggaggcagtcgtgagaaatccttttgaaactaaaaaattgctgtgggcagggcatggtggctcatgcctgcaatcccagtactttgggagggcaaggcaggagaatcacttgagtccaggagttcttgaccagccagggcaaaatcgcgagaccctgtttctaaaataataatacaaatagctagacatggtggtgcatgcctgtggtctcagctactcaggacactgaagcagggggacttcttgagcccaggaggccgaggatgcagtgagctgtgtttgtaccactgcattccagcctgggtgacagaatgagactgactgactgtctatctctgtctctctttatatgtatttatgtatatatgtgtatatttatgtatatatatgtgtgtgtatatatataaatataaaaacttagttttttatatatatacatatatgtatatatatatacatatatgtatatatatatatacatatatgtatatatatatatacatatatgtgtgtgtatatatatatatatatatatatatatatataaaactaagttttttggagtccttttaaatatatgtagttgtagctagctcacatgcatcacctaccacagtgcctagcacataagatacacttaataaaatgtttgttgaatgaccattcaaataaatggcttcctataagtaagatggagatgacaaggttacactatgcccacctagaacccctttgagtgccttggatgctggagggcttggtgcaacggaaagatctgtgatcagtagatctgaacttgaaacctggcttcaccattcattagctgtgacgaccttggtcaatgtatttaatctttctgcaactatttcctttaataaggtcaatactaccaaatgtgcaggtctttagtgagattatagatctgcaaagtgcttcataaagagtctgcctcatagaagaaacttggtggatgtgcatttctttcttttctattttgtttcagaacttgatggaaggaagtacaggtcagaaaggctgagttaaccccaggcaaaaaccactcgggaaatgggcaatgagatatcacagccgctgtcatgccgagggctgtgaccacaccaagaatgagaccactctctttctttgcatgaataccccataagcaagttgaatatgggatgtgaataattcaagtccatttccacaagacagtcacagaaggattggcttcttcaggaaagatgccaaactggggtctttagaactagcttcccgaagacatgcttcaaggacagggaaatacacatgctgtaagcagggaagtcctgaatgctatggcagagatgcaaattggggctgtgtcatgaaaacaaaagttaaaccataaaatgtcactttacatgcagtttaagagagatctatgagaaataaactttagcaaactgctcacatatatcagtgtattacaggtgcctggaaaagcatttctatgaaaatatgcagcatggcatatgtataaatctgtcctgagttttatggtttcatatacagaatcataatgtatataaagtagaggaacacggagatccagtttactgctttaacccatgctagtcaaatggtcttggaataatccaccgaacttacaaagcagcaaacaagtacactcgccacctagaggaaagccagcagcaaaggcaggtctgtctgcaagcattttgtagagtggcaagtgggtggagaacagaatgagatttcttgaccacttgcaaggggtgaggtctctgtaataggtgaggtctctgctaagcacattacattcattctctcacttcagcctccccataactttatgaggcaggtactactgtctccatttcacggatgggaggaccgacaggcaagcgtttgagttacatgtggaagggcacataggcagcagatattgcactgaaatagaagcctcatgaaagcaagggccttgcacaccactgtatcctcagctcttagaacagcgcccaacacttagtaagttcttggtgcatgtgttgagcaagtgagtgaagttggcaaacctggattcagctgactttttgtctggtttcttcccatagaatctttgcagtgatgacaggaatgaagcagcttatttgtgcagaagagtgaattcatgggagtgcagggacagctgcagcctctgagagggcaggttatggagatcctttgggaattcacagtttaaagggcaagctgccccttcttcccagtgcctgccctgaccatttctgcagaccgcgctgccatactaaattatccctgtgctcacatagtagcttctgaggagcaaagctgcctagcatggagtctagaaagaccaagatgcatgggggtggcagacccagttccaagcctcagcactgtcacttattagctatgtgactttggaggtatcacctaaccctatgaaatgagtacattaatgcccatcttaatatcttctaggctggacaagcttcataggctagatagtactcaactccacagcctgtaacctacgatgcaaacggtggcccctgaagttgttcaacacagcggccctgctcctggatgaggacatgggtacagaggagaaagaaggcacaaacagagccagccaaacctgcattcaaacctcagctctgccattctcaagctgtgccatcttgcctcagtttcctcacccataagtgggaataaaagaaatatgtacctcacgggttgttttgaggatgaaattaattaatacatgtaaagcatttggaaggcatgtagcaggtgaatgagaaatattttattgttattttaaatttatgatataattttactatttttaaaattctgtattgaagcaacttattttagggtcttttcctgaacagatttgaagcttctggaagtcaagggttgtatccacttatccacatatcaccctttgtctagtgatgggcaaatacatggtccttgataaatatttgttgaactaatctgaaccatctgttgtcagataaaatccctagtctctttggccatgtttcctcatgaattactttctcctgcttcaaacattgggaaatttgagccaaacacttaacttgttttagttaaaaggtttagatttcactgaacttcagattttgctaaactttccttccccacttttagttccatcttaaatcctcatattttgaaagaaattaggaaaagctctctatgtggctgttagccagaagtccacacataataaagacttctagttgaaagggcttaaaaaaaatctgctgctcttctcctttgggtcatacaattaagtagaagaaatacaaaggcaacaccttccacccaggacccagccagcatcatgcagcctttaaaccttccagggccagtgttagaatcagggcagaagcacccggtttgtcacttgcaacattcatttgtttgcaagacagtatcagggtggatggacactcagtcatgaccacagcccagttccgttcaaagagatttcagctgcaccgagtcagaggcgaggagattgggcttgtctgtgttctccacactataatgataagtggaggtgatcaattgccagagaaactgcagacaaaaaagcccccattaattttctgaaatatttaggaatttgggtaataattcttgagtagttaatatgtgtcacatatagtactattatagtactactaggcacttgcttatatgttaaatttagtcatcatggcagttaaggtaggcatgatgaaccttcagattacagactcagagaggtaaagtaattttcccaaagtcacacagctgaaatttaaatccaggtctgaatctaaatgtcctatgctgagttaaacacttgggctgtggaatcagaaggatctagatgtaaattctaggtctgcctcttaagagctgtattgtttggaggaacctattaaactttaccaatatcatttctaccacatggtaaaatgagaataagaactccactcacagtgttgttgtcaaggttaagtaacatttggcacctgagtctctcagcacaatgtttgccacaaagtaaacaattaatcatgttcagattacttattactactttttaaatttactactcctacatcatgctacttacataattcagatctctcccattctcttaattcttaagagaaaaatggctttagaaatgtttaatttagaaaccctaatttgtctaagctgttttatttaaatgaaaatgcattctatttagaaataggggggctttatcatatgtccttggaaaaactgaaaggagacaagcggatagctaaatagagcttgagtccactgagagacattaaactgaatgctaatatattattatatatttgctaataaattatatttgttgtttaataaaagagagaatatttttaaagtcccaatgatgatatttaactgcataataaaccccacagaaactgctaatcaggagtggggtgattaaatactgcagtgatctaatgctgaaagccttggcattgccacccggtgtccctgatcctcaggctgttctgcataaggctggacaagggctggtctgtggggcatggcctggagcttgtctgctgtccctgtgctggtcaggggccttgctccatgtgcagggagttctgggtaattagaatgtctgtcccagtgattcctttaagcagatatggcctgcccatattgggaatgccccaaaccccaacagaggcacttgcccatgatgttggacttagcccaggtcacctcttggtgcatttactccaatctgtgcttctttctgctcttggttcctcagttcttcagactcgttagctctttctgtccactgtaggatgccctggtgatatggcttggctctgtgtccccacccaaatctcatctcaaattgtaatctccacgtgtcgcgggagggaggtgaatggatcatgggggcggtttcccccatgctgttcttgtaatagtgagttctcatgagatctgatggttttataagtgtttgactgttcctccttcacatgcttgctcttctgctgccttgcgaagaaggtgtctgcttccccttctgccatgattgtaagtttcctaaggcctccccagccatgtggaactgtgagtcaattaaacctctttcctttataaattacccagtctcagggaagttttttatagcagtgtgaaaacgaatgaatacatctggccttggtgacctgttatacaggcatgctttatgactcagtctctgcacctgctctcagatacacttcagatgtttaccttctggtcctacacttggccacggatgagaggcaccttcatctcgccaagattctcagggaatgatcagccagttggcttgctctacggttttctttctccaccttcctcacgagattactctggccaatgagtggtccctggtgagaaactgaggccaagtcaataggttcacagggcaggggtggcagcagcttcacccctgctggacattgttaatgttcagtgaggtcaggcagtctttggtcatacaggagacctaggattaggtctaggcattgggaagcaatggcagagttgtggctgggaaatatttctccagggaagagtgaaatgcatgtccatgcaatttgtaagttaacagcaggcactcaatctcttgactctattactagtggcatgagtagttttcagggactagttttgtgggtagctcccctttagtctgggaacttggatgaagagatgagatggccgaggagtcacttcctaatgaaagcagcatctgaggaaggtgagttctgcacaagtcatcatgccaggactgtggagggtccctggaaggcagaggcatcaagtcttggttcccctttctctctcctagaagagggtatatggtacaaggcactctaaaggcttctggccacgtggcttatgacctaacagaaggaactggagcatattcaaagcttactgtggtgtccacaggggattaagcaaaccagggaataatgtgatcattcatctttccttagcatttggtgtgtgttgggtctgggtcccagtgctttatccagctcagctcgcttaaacctcgcaactaccttatgctctttttaccccaatttcacagaggagaaaatggaggcacagggagattgagtaactggctccaggtaactccagagtcagtgctctgatgctgcccctcttaccatccatttggttctggggaaggttgagtgcaaaacctgataggaagagaggtggaaagagcaccagttttggatttaaatcaccccgggtgtgcctatggctctgtgtctttctgctttgttacactggcaaaattactttactttggttttcttatctataaaatggaggataacgccagcttgaagagttatgaggaagaggtaaaatagttactgtctcccaccaagcccacagtgcctggtccacaatgagcatttgatatatgttggttcttattactatacagaaaagcactttgtaaaatgtgaactataatagacctttaaaactcacaatagcaagattgtaatatgcaccatccttttaagaaataaagttgagaattaaactatcacacaccattgactataagacccatctcaacttcaatgatgctaaatgcaaaatatagtatagtcgacctaggtgcaaaaaactcaaaaagcatttgagatccccttccaccctaactccagcaagaaaggaaagaaatgcaaagaaacaaagacagaaccagtttcttgaggagcacagtgcctgaaccataaagaaaatgaaaagctacacacagatgttcatccaggccagctttctgctggtaggtaatgcatgaaggcaattaggtgctggctcgtctcttcaacattcatggagctgcagagtttaataacgttgaaatctggtgctacctcaaagtaaaaagaggtaatgatgaaagttgcaattaattccttaaatgaattcttaaaatgtcaaaatttgaactacacaagtaatcagtgtacagaaagtggccacaaggtatagaggaggaaagagtgggggacttggagcctgaagacttttgtcatggtctttgctttcctccctaattgccaacaggatctgaactggctgattcacctttggactcaattaccttatctgtcaatggggggctgaaggagcaaacagtaaggctctttcagctctgagcaggcatgcacctgtgccccgcgcaaatgtgcaagccttaagctgaagagggtattaggaaagtgaactttctaatgtttctagcattcccgacctgtcccctggacaatcctgtctctttgctgccagtgctttctatttgcagaaggactgacatgcttgattaaaatgtctcaagcatatccaatcctaatgtattagatctttctttcctcccatgcaatagcagtggcagaaactctgcattgcaaactcatagtttgtttcccgatgttaattctggttatttaaggggtcatccacatgaaaactggtgagggagacatttcagtaaaacaacaacaacaacaacaacaacaacaacaactcccctggtctccaaatgctttacatgagaccacaaggagtctagaaacaatataaaaggacagatagttgtaaagtaagtggccgccaaggagcataaaaataatgacaaggcacgcaaatcacagataaacaagcagaaaatacagagcagtgacaggagtagcataaacaccaaacttctgcacaaaccagcgtttacttatttatttggtccacaacgaggaggaatacagagctgaatatgccacaattcccatttccagttgattctcacattctcatggggcagaaagacagcttcaagatccctttactacaagctgcttgtgcagagtcctaggatggaggtatgatgaaaggttatctggaggtctgaggaaccccaagttgaatcagggggcttatgaaaggctccaaagcgggggaggtcagatggggctcaacaggctgataaaatggttctacatgtagagaaagaaggaattggtattctaaatgactgacataacataaagtccatggttcaggataatagtccagagtgaacggtggctgaattatggattttacagatgtctgtgtgtacatgtgttacaggagacaaacagggaggttgatcttatcttatatgcagtgcagagcaattcatttgttttgaggaggaaagtgataccacaattacataaatcaaggatttaaaacattatcatcatccaaacaaatggaaaccattgttttttatttaccaaagcatatattccatgataatatttagtgccatttacaaagtatctaacatctccaggcattttacaattgtgatgtccttgccaaaaccctcctaaatatgtattattatcccgttttacagatgaggacactgaggttctgagaagtgacataatctgcatatcatggcagagcgaagactagagaaaaggctatccgattcaaaaggctgctttactcccacctgcagtatacgcctaccaccacatgctactgattttggcagccaagagcatgactctgtattttaacaggaaaagccagagatgaaaagtactgtcattagcatagctcctcaaggttactcttaggaatcctaagcaccataccatgcagcactatacaaaaatctggttcagataatgatgctggcccaatttatctgtcatgatacggctgagacacacacggcttcatgcatcaacttactatcgcaacaaactattagcaaaaaactattattgggtttggggaaagagcagcagtcctaatgttctattcccacagccattctcataggaaagggttggaaatagaacagagtctatctttacgatctgaatgacataagagacagtggatgacacaagcacaatattctgctttcataattttatgatttcctgtctagtctgcaggaacaagtaaaacaacaacctctctggttctgtgatagcatctgtccttagaaaacactcatttttagcacagtcagggttgaaattggatgagaaattcaggggtttctccttagcctcagttgttcaatcttcagaggcccactgtctgaaattcaggggaaaaggggctcagtcaacttcatattaactttttcttaatatttataactgtgacatgcaactataactatattattatgtaaattgagaaacggaaaggagagaaatgactcattatatatctctctgggaacttccatcaaaaatgtaaatcatgtaagtttcagaattctaggtgggcacctggaatcttccacttgtagttttctttggagaagattaaaaataaagaaaaccatatgttccactttagtgagcaagagtgaagggacatcggtattaaaagcagaagcaaaataggcagatgagagcttcattttatactgagaaggcatgggtgcaatttacctgcaggccattttcactgggacaacgaggaaaatgtgcccgtgcagagacaaggagtccccacagtctaccccttccaccaattttcagtgttttcctgaacagatttcaagcaacaaaacagtcagctgctgggtaatagctccggttacagctgaaaatgttagtcatttcattatacacactccaaaaggggtatataaaagttgtttacaagggcaaagccgtagttctgaaagctggctttaagagctccttctaccttgccatattttaattctttgaacgtgcaccaacaattacatttttataactgctagcacaggaagttattaaaacacttggctcctatgtgtcttggtccttgcctctgctggaacattgtaaattgttatggctagcacatttgtgcaaacctactgagagaaacatcatatggaaataatttcagtggctagtgaagggtagttaaggacaaccttaacatctaggccatatgatgcagtgattaagaggaaaggtgctagagtcagagggactaagcttgaatcctagatctgcctattaatccctatgggagcaggtcacttagcctatcaaagtctcggtgttcccatttgcaaaatgggaacaataagggtacctccctatataggatgtggtgggaattaaatgagatatacaaagcatctagtaagtgcccaatgttagttaattattaattaattgttagttaataattaacataagctagttaattataattagttaataattaacattaaatgttagttaattgttggggtgatatctttttctcttctacatcagggcagagttcttcaatctgtggcagaatgaaatttcatgaccaaatccatacaagaaagtgttgtaatcactttcttaagagtactgaaagtgaacaatgacaaaactctaccttgtgcctccttcaacaaggggtttcagcccacagcaagattgacactgctgcctggccatgtctgtaagtgagtgacagcaggtaaacaattgtcagcatcccaaactagtatgttaatgtctccccagtggccacgtttgttatcctgttccctcatattggaattacttggctcaggagatctgccaataatatacttttggctgggttttgaaatcaccttgggatacccagtcacacagtgaggctttgtggtacatggttctctgtgccacgtttcacacaggccactgaagggctgtcaatattggcatcaggagagctgagttcaagtcctggatctacctcctattgatgatgtgattttgggcacattatatgaactctgagcctctgtttcctcatataaaaaatgaagaatggggataatattatttatttcacagggtttttgtgaagactaaaagacgtgatgcaaaagggcattgtaaagtataaagagccacatagatgttattataacttttggtaaacaggatcatcattgttggatcagttgcttatattaagaattctgagggtttctgtggctgaagattgccatgatacacataagaataaatgttatatttcttatttaaaggtcagagtggtgagattggataaggataaggtacaatggtgagaggtgagtggctgtttgtacagggctgtgccaggctacagggatgcagaaaaagaagtgtgcaaagacagagcaagatttacttattcctgatttattagaactgaatttctttacatttttcttccttccttacaggcatatcccatttcatccttatgttctttccaaatctcattcctggaaaccctttctcccctagtctcttgagacactttggacttagcactcatgaagcattaatttttaaatggcatatgcttttacaggatccagtgctgaccccatgaaattagccctccctatttagaaccacccaattatgtagagactcaagcacaatgagatctgcaattctctttgcctcataagtcttaaggctttattttcagcattgtcttgttttctttctccaaaacatccaggaaactgaatggctggaagtctgactgcaaaacaatggttaggatagtggccaaatatgtgatgtttctgaatatggaggaggtgggcctgacattccatgctgcagatatgcaagaataactggaggaaagaaccaactggtggggcatagttggcccctgtccacattcacttttcctagacagtcttggaggatggatgctttttccttaagttaggttttctcctccccttaggcttttacctatataacagaaacagacttctaatgatatatttatatatgccagtaacatataatatatagagatgatatagctgtgtattaatagttgctctgctatgtgtctataataaacactacatagcagttattgatttatctctcccactaaaatacctttaggggtattcagaatagacgcccctccagcagccatcttgatacactaagatttggggaagcaaacaaaaatagactgagaatgggacaaagatattacactaagtatttgacttaatcctactccccacaacctgtgggctgtattgcgctgacctcctatgaagccaaggacagaaactgtactctctgaaatcttaacataaaataccttccatgccatttatgaagccactgtccctcagcttcaaatctaactttctgtactttgctttgaggtgctgggactaaggactagcaacctgcgtttctgctttgccagctgatccttgttaggttctgccagtagggggtgctaaaggagactgcgaggccagaggacacgggagagatctgatactcctagtagtgtcagcttagtgtttgcttcaagcaaagtgttgctggcctcgctttttcattctggcagcagcagttcctccctctaacagaaatctaattcagtttgcagtttctccaacgttgcagaaccagcctcattgtggagattttctaaatgcatgagttaaaatggcaaaagtggaaaaataaggatgagagagagagagaaaaaagatgtacatacagcaagtataggattagaaaggcattaggaaaagctttacctgtgaaaaacccctttccccctattatattttaaacctgctgagtttgataaaatgagaactaggtcactattgcagatgtgtgttttttttttttttaatgagatgatttgggtcaactttctatataccaactttatatatagttgtttcaaaggagactcagcatagcaaagagagagcatagtaaaaaattcatgggaaaaaagctgcaatcaatgtagaatgagtctttgaaaattagccaattaatctggctttgctttgtttccctcatgtctagggacttgatttacataaaataaatccagtgtgaacaatgaatacatacacagaaaataagagttgaataaaagattacttatgtatatgactagacacttcaaaggcttatagtgaaagatgaatcaccaaaggctatatctgaaaagaactccagacccatgattttcttaaaatgaactataatggattctgtaaggctagaaagggttcaagacagaactgtaagacttctcatatggtccactatatacaacagccacctgcttgctattgccattaatttctgccttaattctcttacagatagaaccagatacaacagccaccctcttgctaatgccattaatgtttgccttaattttctcacagataaagtcaagaccaattagtggaaaacacacagtggtaaatttcaactccttgaagaaagtttctaatgatctcatctgtatgatgaaggatcagctacctaggaaggtagttaatttgctccaactagtattagtgaagcttaagttggaggactgcttgaatctagaatcagacgggagagtcccttttgcactgagattctcaggattctttagcagccagtaacaagaatatgttacaacagaaattaacagctctattcatttagataagagaggatttgagacagaaccagcctttaactggagtcttttttttttttggcttcaaccttagcaccttctcccacctcaaggtgtgcattatactctagaggagacaggatgccttacagtaatcatatttttcagaggctaagttgctcttcccaaaggaaatacagtgccataatcatgtataagagttctgggttcagaaactatctttgcttggatcgccataacaaaataccatagactgagtggtttaaacaacagaaatttatttctgtacagttatggagtctggaactccaagattatagggtgccattgtggttgagttctggtgagggtgcttttcctctgttcacatggcctttttttttctctgtgtgtttgtgtgtatgtgtatggggcggggacgggggaagttggggagagaagagaacaaactatctgatgtctcttcttaaaagggcactaatcccatcatgagagtcctatcctcacaacctcatctaaccctaattatctaccaaaagccccatatccaaatatcaatactctagacattaaggcttcaatacatgaatgtggaggggaggcacaaatattcactctataacataaaccaaagtgtgaagcaaaggtgtggcaacttactagttggatggctttgggtaaattgtatacaccctctaaatctcatttacttcactggaaaatatgaaccacaataacttctcgatgaggttttggggtactgcataagtcaacaaacagtaagcatgtttcacataaaaaatagtccaagtaaatgtagccactactactgttgttgttatcatcatcgattccgataggacaaggatgaatctggaagttattccatacgctgctctttctgtctccattacctagcccctgccttgctttgctaattagtagttatgcttaaatccagctcaagttttactttgtctagaaggccacctttgattatccccatgagttagatggcacggaccttgctctttcatgacatactaggatgcatttgcatgcaaatagccttaccattgctgggtgaatgtgattttctttctttgattttgctagctagactctgagatacttgaagaaccacctggagttagtcccagcttcacagttaagggcatagttttccacaaactcctctcacttaagatgccagtcacaagtttggaggtctcttgggccactgtcacttttgatgagctggatacaaattcactggtccccacggacaccctcaggtttggtaattcaatagaactcctcccagaactcaggatcatgctatacttgtgattagaatacaaacagggaccaaccaaagtaagagatgcatagaaagaagtctgggaggattctaaatgtgaaactcccaccatcctcaaggatatcttaccctcttagcacatcaatatatgacaatacttataggactgccaaccgggaaagctcacctgagctttggtgtccagagtttttattgaggcttaattgtgtccactgattgactgaatcattggccatgattcactggccatcaataaccagtccctttcctttccccatgggttaatattaggcagctcaaagccccagccttctaatcacacagttggtctttctaatgcagccagctcccatcttgactcaccttattagcataatctatctgggagcccaccatgagtcacctcattagcaaaaactatcaggtgtatgttccaaggggtccaccatggaaaacagagacattcctatcacttgggaaattacaaaagtttagtggttacctcccaggaaccggggaaaaaggaaagccaatttttttttatgacatagggataatgattatgcaccctaagttgcttagtagatcacccaaaacatggtaagtggtccataaatatttgctaaatgaataacagagtgaataataaaagtcaagacaaggccattgttttaaccttatgaaaggagagttggccaattatctttatttttctggatagatttacttctggcatttgaagccctcacatctcttgttctatttccttctctactttctcctattttcattgagttcatcccactatcaccatttcttactactgtgaaacagactttgaatttctacttaaaaccctgcttttgcctttcacaccttttcaatgggattttacagttctgagagctgaggaagtgaaacagaaaacactgtgtaagaaaatcaaattcttctctcagtaacaaaggtgccttgatgcaggacagcatttcaattatggtgttcatttccttccacattaatgtcatttgagttgccactccattacttattattagtcaaatcaataaacaacatgcaggctcacaactcactgcatgtcaaactgaggcgtgcaggtggagctgttaatgcaaactgatatttcaggtgtcaaagggcacattggctcctgagcaaggtttgaggagtgcagtttggttcaacaaacaattattgagtgccttgtatgtgtcagatgttgtgctgggtgccaagaataccagtactaagaaggggcagcatcttcctgaggaacctagtgtcttagggagagtggggatggggacaggcagaatggactttccctctgaggtcctttaattcaaaaaaattcttcagggtctcttcatcaccttctgaagtatgactggtatacatcaaattgcatttattctactgcaccctgacactcctcatctcactttcctgctttatttttctccatggtactcaccaacctctgacacactatgtaatttgcctattggtttatttgcttgtctctcccccagctagaatgtaagctccatgaaggcaagtgtttttgtctagtcattcatagctgcatgtctagttttaaaatctgggtctggaacatggtaggtgttcaataaaaatgtgctgaattaatgaacgaatctactaaacagggggttcctcctgctgcccaaatgtctaagactcctcttgggtagtgaaaaagttgaaaagacatttatagtgcaatgatcctccagagtgggctggacatgttccttaagctgccaggccgcagggcagtgtccatggcctcagggagccggtgggggggaaccaatatgcagtcaaaaccagacaatataatgtgtgttgtctcattcaacccttgatgtatccctgtgagatagaagttattcttccaatttcagaaatgagaagatgggtggtgaaatagcttgcctacagccccacagctcatcagtgctagagctaagctttaaatccatgcctgagagatgccatggttcatgctttcctcatctatgatgttaggctgcctctatatcatatcttagtgaatgtgaaaagtaagcaagatgcatttgctccactagaagcacccacagcctaagctagacaaatattcacagaggaaaccacgttgattctgtaagatgggaccatgcacccctttgcaccattcaaagaaggctgaacagggcagatataaaaatgatgcagtgaatgagctgttggcttccctcatctccctattaactgtgccctggtgacttactcttaagagacatcaaatgaggaaataaatggctattgccaaataaacaaaggcaatgttttaaaagtctctgtcatgtcctgatagttcctgacgatgccactaagcccatttcaactgtcattaatcctagtctgactcattctggttaaggactactgctcccatgtctgagccaacaatgccccaggaaggtactaggttaggaaatattccatcccttgagcaggaagaagactctgaaaatagtatattgtctccatgccttgcttaaaggtggactggagttcacataacagcttctttaagtaaccatgccctctgcactccccctaaacctccttgccactttgtggctatttttcttggcagctagtttttactcctttctttcctgtgctcttctcatctcacttttatcagtgtttccccaaaagcagaccatgcttccagtgactcctcagccatgacagtagatttctctgtatctacagcttaagcaactagctgatgctaagacctctgcctcttaattgcccttgctccttctgcaccctggacatcattgctgaccttcattgaactaacactcaagatacccgctcgactttataattcctggcttctcctttggaggtgacagggcttccttacccttcattataccacttttagggtggttggctagtcaaccactgaatcaatccagatgtcttctaacatagtcacatggtttatgatgttttattttgtaaagcttagcagaaatgtagctccatatagtggttttcaaaccctataaaataatactgaatattttaatgcaagttagataattatcaatataaaaattaaagggaaatttcaaaataatggtaagaacagtttctcagaaatagtctccttaattcagaagttaaaactcagaagtacctggatcacactgagcttatggatccccggtatgaggaatgaacacaatggtttatttctgtttgattggcaatgagattgacatatttctttggctcccctgtgctattaaaaaaaaaagagcctctaaattgagactactgcccatttcagtaagaaatgaggccacatgtcaatagaatataggtaactacacatttataacactgggcagtgatgcagaattgattagcaagtgtaattgcagtaagtaagatgctttctgctcctggtactgatgactcgtggcatattgaaaggaaaaagcatgattttcaaggaaatgagattctcaatattaagatggggtctaaaagtgcctaaatagaattggaaataacctaagtattgaatgagactgtagagtgtaatggttaagagcatgggctttaggggaagacagatctgaatgcaaatatctgttttaacatgtattagctttgaagtgcagcaagttctttaaattctttaagtctcagtctcctctataatgagacgagatgctcacagtgtttattctctaggtggttgtgagaattaaagcgatgttgcaggtaaagcacagactgcacttgtcacacagccagtgctaaaacagacaaaccaaccaaccccaagcaaaaaactatctatattgttttcatagttcaccagcaattccagttcctggaaggcaaccagtcagtgatctactgaagctaagtcagtctacggatgaggtgcatgtctgtaattgatcagattcagacctagagggaattggtaatctggtcccctcaggacagaatgtggagttctgcctcatgaactcaatctgtaagtatcaggaaaaatcttcccagaatgggaaatgtaaaaagaaagttccaaacatgcctaattatttctaacagattctaaaaacctctcaaaatgaattctgcataaaatgtaaatctaaacagtttgatgatgatccactgtttctacattattcagtctttaaacataaataagcctaggttttctttaaacaattctatcacagagttcaaataaagcaggtgtaacacacacacacacacacacacacacacacacacacacaaagatattctactttagctctctcgtatctggaaatcattcatcttatctgctgctcgctctccctctttctttttaagtaaacattaatccccacagatggtgaaccacggtaatctctgctaccagctgcagagaagaatttttaatgaaatgggaatttaaagggttttacacaaagcaccagaatctattccgctccttctcataatgctcaaattatttttactgccatgggttataaatgcatgtttgtattactgcttctgagagaaactgacctattgcttagaaggtgcttactgctttaagcgtgccgtctcctgcctcacccagtataagggtgtcaagtccccagtaaaaggcactcagtggttaagattacaagatttatcccagaactgaccttattttacactaccaaccctgcccaatctccacctgacttttgttgatatgtctcctgatcttctggcctcccttttaataaactccacagagttgtggctttgatttagctacatctctaactgaaagatttgattcctgtttttttctctccctagtccagcactgctcagactaaccacctggtattctgacatctcctgcttggccttatgaccttcctttacaaataacacttatgagcagctctgttggacaccactcagtgtttatagtcaccagctctcctcgattcttgcccaagagtgttgatatagaacactcatgatcattctcaaatcttttaagaaagaaattcaagttagctatgaagccaaaagtttttttgtttttttttttttacaaaagatgttataaaaggtgacatgcacacacaagtataaaaaatggaaaatcaagataatgtctaatttaagttaagctaattacttttgatgaaaacgtattactttaaaaaagatttatacacctctaaagccgttcaaaatatatcagcatagaaagattttgatgctcataataatttttatatataaattatcaggggggaaaagtcaaactccaatagaaaaaggactattttcacaaattaagggtacacatacaagaagaaaatattaataagattaagaagttcatctctattgatgttatgaaaatttcagccttgaacactaacttatggccacaaatccaatcataaaccatttcaaatggaccaggaaaagaccccaatgtcatggaaagagtagctgcttgaaggtcagaaagcctaagagctggtcttcctggtcctgccatcaactcactttgtgctgggggctgagttgctaggcctcttctagactcagtttcctgacgtgaaagtttactcctgaggcctcccaggtctgtttaatatgggatcaccaggaaacaacataaaacacagcagtaaacttaacaggagtctccctgtcagatccttgaactgatttcacatgaagaacatttagaaggcaggtttcagaaccctggacagagccattttgactcagaatgaggcacggagtgaaagccatttaggctgggtatagtggctcatgcttgtgatcccagaactttgggaggctgaggggagaggatcacttgaggtcaagagcttgagactagcctgggcaatagagcaaaccccctgtctctacaaaaaatagtaatataaaaaagcagtttgtctgccagagtaggaaaaaaatcaaaggacaagaaaatgtctgaatgtcaatttttaggaagactgtcctcaactacccaaagtggtgtttcttactacattatttgtgctcctaaagcactgtataaagatgtctattagaacccatgttaacatccctggcaatatcatgaacttcttaaagcagggcttctcaagttttagtgcttgtccgagtcatcacagccaatcctcagaccttcctgcccaaaccactctttaattagtatttactaaggccaatctattgctgcatgaacttttaggattcaagaatctgacatacagttatgatactctgtcttagcctctccttataaggatgttgacagccagaagaatcacattgaatcaaagccagtgatagaattctgtcaatgactgattatacttatacagttagcagcccctcctaggagattgccctgttgatccaagaatcaccaagagcttttcctgagccatagctttatagggcatgctatgctattttgcccatcatgaaagagctggcagtccacaaataacctgagggcaggatcacactctaaagtgacttgagcaaatgatttgtgtaagctaatgtgaacctcctatggctgtgctgtcatcaaaacactgggtcaaatcaaataagtccatcaaggtgctataaaatatgcatgcaaagagaatggatgtgatgttgttgagaataataaaacagtccataaaagctatgaaataaatcaactgttctttcaggcatggaatacaaaacaccacatacatccatatatattatatatgctgtaagcacacatttattatatatgagcacttattgacatgctagagaaaacaaagtgattaaggtgtttgcttcgtggaagcaatcgccatcaaggaagcattggcacagggactgaaacaatcctttgccctctgatcaatggctttgccaaggataatctcactggtgaacacttcttgtggggaacatgtgtatccctagaaaggatgaattacaaataagaaatacagggggtggtgggattattcttatgccatgactcaggcagctagctctaagatgttctaaagagattcttcgctttcctctaaaaacatgtttttaatatcagatcatggggtgaaaatgtaccctcacccttcagacaaaacattgaatggtagagatttcttctctttttccacccctccctccttccttctttactttcttcccactttacttttttttttttttttttttttttttgagacagagtcttgctctgtcactcagggtggagtggagtggcatgatcttggctcactgcaacctctgcttcctgggttcaagcaattctcctgtctcagcctcctgagtagctgggactacaggtgtgcccaaccatgcctggcttgcttatttatttatttatttatttaagatggagtttcgctcttgttgcccaggctggagtgcaatggcatgatctcagctcactgcaaccttcgcctcccaggttcaagcgattctcctgcctcagcctcccgaatagctgggattacaggtgcccaccaccaggcctaatttttttttttttttttttttttttagtagagacggggcttcaccatgttggccaggctggtcacgaactcctgacctcaggtgatccacctgccttggcctcccaaagtgttgggattacagatgtgagccatcgcgcccagccacacctgggtaatttttgtatttttagttgagatggggttacgccatgttggtcagcctggtcttgaactcctgacctcaggtgatccacctgcctcagcctcccaaagtgctgggattacaggtgtgagccaccatgccagcccttccttcttctttaaactttttttttttgagtgtactttaataccagttgcttctctacttgctatataagcaatgtcagcattacttactgagcatgtgtatgcgacagcccttttctatgtaccagagggtcagaaccacagacacaaatgaactaccaccactaccctgagagagttcatcatgtaccttcaaagactcatgtgtaggcaactaatgcaaatgccaagaagaatgaaacatgtaccttaaaagataatataaccaaaggaagaattactaatcccaactgcagagattttgggaaagggtcccagtgtcctgtacaagatggcatttgaattttgactgaggaataggattttttttattggtaaagaaatgggaaaagcatacccaggtaagaaacagcacgttaaagacagagagcagaaaggcagtggctacacttggtcttttctatggagaatttctgcagtgcctgtgctcccataagtctctggctagaatggaaatacatttccttccttttgatagcacaaagaatagggtttattccacagagtgacttggaaccttagtcatagtgttttttcagctttattactcacctacctgtgataagggcctctcccagcaaagtgtcttgaatcactaaaagtttgtctctccttcgtagggctcatagttgacacaggggccagagaccaagcaagttcaagagtagcaccccaaaccattgtttcttcagaaattatcagccccatcccaccagatttatgacaaacctacggtgttcttcccccttcagagacctctttgtatctctctgctatctgccttctgtcaagagatttccagtgtttagacatctcaatacatgtcagaactccaaatgtagaaaggattcaagtctccttgtaagggtatactaggtcctgaacaaatagagaccatttacagagctgtctggagctggctcatactagcttgcaagagccaattgttaaattttcaggaattttgcaaactggttaataccatattggtagcttgaaattggccatggttggagaatttatatcacagagactggtaaaggctacaaattaggactcttatttccagggagcttattgttaggttcttgccagtactgcaccaagtatgtaactctaaatagccctcaaaccttccacaccagttagccaaaagcacctaagtggctttcagaggattaccatcttactccatatgcatggaatgttggtgtctcagggagtgttgagagatatatatcaacaatggtgctgatcaaacacccactgtcaagagttcaatgtgctgtaggagaagaagagaagtgctggagtttagtttctaagcatgctggctctaatctttactaactgtgggatttgagggaagttatttaagtctctgcattgttttttttccctcacctgcaaagtggggaccataatacttatgtaacagcgttaaagattaaataaaataatatttgaaggtacttagaacaaggtacagaacagagtaagtacccaataaatgatgacaatgaggatagacaactaggttcaaatgctggcactgctacttttcagtttgtaccatcttgttaaacttatttcacttctctgagcctcggtatttttcctataaagaattggaaaaacataaactccttcacagagtgcagtgcattaggtagttggcactcagcaatcgttctatcatcctgatctcagtattacaggacctgggaggcaaaaaactacatctcccacactcccttggagctagcattcataagcaaattaggttccaccaatacaacgtacttgtttgaaatgtagatgcaagagagaggccaattttttgctttttggctttctttattggcaagcatggctgtggagatgttgggcttcactgcagcacaattctagtgtccatgactggccatgggtgtgctgagaggcaattgtgctggctggggtgggcctttggttctgctccttttgactgtggcagtagaagcagctctcctggtttccacagtgttgttctgggagtcactctgagtgtccagcctagtgtttttcttcagcccacccaatgatgtaaatacacatttcactgcctaaaatgaccaaaaacgtgtttgtgttctgcaactagaccctgattgataagcagtgtttgggaggattacacaagcacataggatagtgcaccagacctgcaacacttactattgtgcctggcttctattgtgtgttcttaataaatctgagttccttttcttcccagacttgtcaaccctcctttgtcaatggaagaaaaagacccagttaactatggcttttaatcagcatgacttgttttatgaacttcctgtgtagagtgtaggggaaatgtatatatttgcttcctgaagaatccagaccaatgctctaagtccatttttgtacatataaatacttgaaggataccaaacaatattacaagactgtggctttcatggccaggactatgtggtatattttccttgagagttaagaatcaggtttgggttcatttatgcccattcttagtggaggttttgtccaacccctaatatcatcttattaattccattaaaaatttctcatctgagcatctactcttggagtaattattaaaaaaaaaaaaaaaaaacaaaaactgaaaactcagctctcctttatctgctcttttattcaagtcattttcaaatttgtttcccaggcaatagtaattgtttcagtaattaaaatgtcaggaggcgggcagagttgattagaatagcctctgaccacatgcaccaggaaaggcatatgagagagcaccaggtgacctcattattaacgtggtctattatattaaccttgttacacatgtaaaatgtactgaaaacattgatactcagctcttccttgttttgtttctgatacctcaagcaatagcccactattagaattaaccactgcaagattattacaaaatgaaggacagaaaaatgaaatgtagatatgagttgaaataactctaacaccaaattcagcatctatttctattactcatatagagtgtctgttttacccaaggctattgcaacttaaactgggtctttcctcctgttgacatgtctccacgcttacccttgggcatcctgtatagggtagggtgaggggtagtgagtaaggaagatgtttttcttctgtttttttttcttttttttcttttcttttcttttcttttcttttcttttcttagggtctttctttgttgcccaggctggagtggtttgatcatggttcactgcaggcttgacctcctgggctcaagccatcctcccacctcaacctcccaagtagctgggactacaggtgtaagacaccacccccagctaatttctaaatgttttttagagatagggtctccctatatttcccaggaaccaggagagctgcttatactcttatactgcccaagttagtcttgaactcctgggttcaagcaatcctcccatactggccttccaaagtgctgggattatgggtatgaggcactgtgcccagcctagaaaggcagttttgacctggatctagatctgtgttcctagactgatggagaaccatggtattattagaaggttaccaagtcaccgtgatacacttaacactttcaagagtcaacacaatggaacgacaaatacttttgaacttaaaagtcatttaagctctgtttacagctcacagtccttcttcatgtggaggcagctttatgcaatggggaagaaggctgtttctgcagtcattctaatctgggttctattctttatactgcaccccaatctctgggacagagacaagtctctcagccctgttcttttgtgtttttacttatttttaattttttcaacttaaaaagttatttatattactaaagtttattttttggggggggtatatagttaaatgagttttagtacatgtggattattgtagccactgccaaaatcaggatacagaacaattccaacacccccaacatttccctcaagcagtttcttttaacttaactccccttcaccaccctctgacacttcttactcctggagaccgctgattgttatctattcctatttcttttttccagaatgttctataaatggaataatataaaactttttggagtcagtttccttgacttagcacaatgcctttgagattcatatatgctattgcatttatcaatagttcatttctttttattgctgagtagtatcccattgcatggggaccatggtttatctgtttaactatggaaagacatgagagttgtctccagttgtcagtgatatagataatgcagctataaacattcatgtgtaggttttatgtgaagataaaattttatttcttctctcgtttttttttttttttttttttttttgaacaaggtctcaccctgtcacccaggctggagtacagtggcatgatctcagctcactgcagcctggacctctcaggctcaagcaatcctcccacctcggcctcttgagtagctgggactacaggtgcatgccaccacacccagctacttttttttcatctttttttttttttttttggtagagatgaggtctctctatgttgcccaggctggtctcaaactcctgagctcaagtgatcctcctgccttggcctctcagagtgctgggattacagcatgagtcagtgcacctggcagtttttatttctttagtgcaaaatgtctccaccttgaatttaaagtggaataaccctttgttgtggggaatgtcctgtgcattgcaggatgtttggcagcatccttggatctatccattaggtacccgtaacagcctctgaaccagttgtgaaaaccaaaatgtctcctcacattaccaaatgttggggggcaaaattgacttcagtgaagacttcagtgaagaattcagtgacttactgaagacttcagtaaaaactcataagcaagatcctggtccatatggtagtatatgtttcactttaaatgaagctgccaagctatttttcagggcatctgtaccattttgcattcccccagctatgcctgagagctccaattgttctgtatctttgtgagtacttgatattagcaggtttcttaaattttttgccattctgtaattagggagtcccttgattttaaaatcaggaacgacaccgtggcaaatattagtgcatgcagctcactaatatttctagttctgaaattctcctcacttgagaaagtttcatttcctgctccttttaggttgcatgtgactatatgaattggcttggctagagtgaaagtggggtgggtcacttcatggtggacatgtgtaggagctgttgcacactgctccatcttccctcccccaagctttagcaaccacctacagtccagatggtggagatgtcatcagccaatgttgctgagtagaaatgacatggaagagagtaccctgccaaacctcaaatggacatgaggtatgtgtgagaaataaaactttgtttaaatccactggtattttgagattgtttgctagcttattttgactaaatcaaattactatgtgatagactcattgtgagcatttatgtgacaaatgtgggtaatgcatttaacacaattcttggctcaaaaggagttcagagtgaatgattgctactattataactatttactcttccctgaccatcccgcatcatgatgattctctctttgataaactcacagcttttactctctgtaatgcattagcagaactactttagcttcttcaatgcaccttggcaataaatcaaattcaaagatatgaagttaagtacccatttcattgaccacctgatcatcaggtgtgctggtacaccatctaaggttcaagggggtagcatcactgtattggtgcaaacatctctaaatgacaattagtattactaagtcattttaaaacctgtcttctataggtcagtgtatagaaggtctttcattaaccagcaactttttcacattttttgtctatttgtccatttcctaagaatataaagagaggtaaagaggtataaaaacacagtgattctcggctgggtgtggtgactcacacctgtaatcccagcactttgggaggccgaggcagacggatcacaaggtcaggagattgagaccatcctggctaacatggtgaaaccccaactctactaaaaatacaaaaaattagccaggcatggtggcacacgtatgtagtcccagctactcgggaggctgaggcaggagaattgcttgaacccagaaggcggaggttacagtgagccaagatcgcaccactgcactccagcctgggtgacagagcatgactccgtctcaaaaaaaaaaaaaaaaaaaaaaaagaaaaaggaaaaaagaaaaaaacacaatgattcacaaagctgatagtgcatcagaattacctccagaaagttgggaattctggttctaagatttaaccacactgaggcctaagacttaacatattttttaaagttctccatataattctgataagtagacaagttcagaagcccctgcattagttgtagaaatgtaggaagtatgaccctaagaaacttggcaagacgcagaaaaactcctgcaattaccccagctatttagagatgtgaagagtttctattacctacctggcagaatcacaatctgtcataggatatttttcacattattgttcaagattgaaatgtatccctggctctgatctaactggcagacagacctgaggaagagaactcaactctgtaggcaccagggttcatatctgcaaattgtgtgagttgggcttccacctataaaaatctttgatccattatcttctgtgatccaggtattcattttaattactcaatcagattattgcatgtattgaggaatcttctacattttccaggattttaatacataatatgagccaaagaaatgtttttcaagcttataactattcattcactgacaaacagggtgctcttccaaggaactctttttcaattttttcatgttcatatatatatatatatatatatatatatatatatatatatatatatatatatatatatatatgggtgtgtgtgtgtgtgtgtgtatgtgtgtatgtgtgtttgtgtatatatatatataatgaacaaatataacaataaaattctataattcccaaatctcaaaataaccacttttggcattttagattattgttttcatttttaaataaaaacatatactatataactttgtgactttcctttttattttccattataacatgagaatttccccatgattcaatttattcaaaatggaacttaaacaactgaatagtttcttatcagttggttatcacacttgtgtagccatttatctactgtcagatatttcaggtggtttctaattattgtccactgaacatggtgttacagtgaattttttcatgtgtagctctatttctttaggataaactaccagaattggaattactggggagacaaatactacaaatagctgcataagcctttaaaatgtcctattttaattattttcttcttctactcatctttcttactgctcccaagattatctatctaacccagagattctactctctattctacttcattaaatctactatgggatccccattcaagacagtggagctgagcacacttatttgataactccagacttctcaatattattaagatgaacaaaaaggtctaaaataaagacctacatcaacgaaaactctagaaaacaggagtagatagaaacgttgagaaacttctgaatgataaagagcaagtaagataggcttggctgaagtgaggaccagagaacagagtgtcccaaagctgaccaatgaaaagctcactgcagagaggtcattgctcccaacagaatcctggagaaactgtgagcatgaggagcagaaatgaaatgcaaaaagtcccctattaaattcttcttatccacattagggaggagaattcttctaaaaagaaaaggaagtgacatgtgtccgtgagtgaacttcactgaccaatggcactccttgagtgaaggtgtattaatcatgtcttctattttctgtatgctttgatatctggggcctaggtgactcaggaggaagtgcccctccaagggttagccaattcctagacataatgaacaatttgcctctaagcatgcctttcatatgcaaactggccaatccagaatccacacctcaactatcttctttatagggctctcatactccaggccactaaccacctgctctaatcaccccagagcctgctgaaactaataagccagtcctaaccctgctttccttgccttacctcttccagcagaaaccgtaataaggctcttccccatagttccctcctccctttattcctcctgaccaaccctggtatgtccccgtgtggtactgagtagattggcatgccccttcctcttgggaactgtcagcaaaaaaatatttttttttctttttttttgaggcagggtcttgctctgtcacccaggctggagtgcagtggcatgatcttgcctcactgcaaccccatttccagggctcaagtgatccttcctcctcagcctaacaagtagatgggacggcatgtgccaatgcacccagctaatttttgtatcttttgtagagatggtgtcttgccatgttgcccaggcttgtcttgaactcctgggctcaagcgatcctcctgcctcagcctttcaaagtgctgggagtataggtgtgagacattgtgccctgccacaaaatgtcttttccgtggcaattattttctaatctgttgggctcactgcacctcacatttttaataccttcccaacttaactgttgactccctgccaatctcctataggaaatcttatttattggcatatctggtaagtttcagtaataaaaaaaaataagtaatgaaagacttacgtggaagcatgaaaaaaaccaatgttcatagtgcattgatagatgaagaaagaaactaaaagagggagcacagaacttatttctacaaatatatgtagaaatgtagttgtatttcaaattagtggtgattagacaatttatttaatatattgagtaattagaaaaaagttttatcggccgggcgcgggtggctcacgcctgtaatcccagcactttgggaggccgagacaggcggatcatgaggtcaggagatcgagaccatcctggctaatacggtgaaaccctgtctctactaaaaattaaaaaaaaaattagccaggcatggtggctggcgcctgtagtcccagctactcgggaggctgaggcagaagaatggcgtgaacctgggaggcggagcttgaaatgagccgagatcacgccactgcactccagcctgggcgacagagcgagactccgtctcaagaaaaaaaaaaaaaaaaaaagttttatccttttatcatacaatgaactcaaaataattttgagatagattacggatataaaaaaccataatgattaaattaatagcataatgtttttataatcttatgctaaagaaggatttatcaataaaggacgaaacccaggattcacaaagattcatgtattttgtattttaaaaatggaagctttggtacaccagcaaaagtcactataaacacattcaaaagacaaatgataaaaaagaaaaaatttgcaacacctaaaacataagaatggttaatattcataaagtataaaaacataaaaatcaatataaaaaagacagcctatctgatagaaaaaaagaacggggatatgtataggcaatttacaaacaaatacaaaaggcaaacatatgaaaaggtgatgaacctcactaacaaggagacacaaattcagtcaataatgagagggcatttttcccatattaagttgtcaaaaattataaagactggtaatatccaggtttggcaaagctgtgtgggaggtgggtaggaacggaacatctttcactgttaatgacaggagaacagctttggagaagacaaataggcagaacccatctaaactacaagttagtgagtttttggtttggcaatttcacttctaggcacatatcctattggaatgcttgctcacatgcataaagacacatgcgcaaaatgttagaagctatatgatttgtaatagtaaaaaagtggaggaatgctaatggttcatcaatagcccacagttgaatattgtggaaaacttcgcagtggcaacaaaaaaaaaaaaaaagaaaagaaaagaatagagttacacggcctgactttaaaatagatgcgtatgttatgctgttggctaaaaagaaagaaaagttgcaaaatgatataacatgtacagtattcgctatgtatatatgtgtttataaaaatattttataaaagatagctatttatatatacaaaatataagtaattgatgaaaaactgtttcataaaattatcgtgttatattatcatatcctttttcatttttcccagttaatcatttgaattcccataagccttagtacaagaaaatccaggatctcccacttgagattgcctatccccagaattgtcccaaaacctcagcacctcattaatgccaattgtaaattgtgtgtgtgtatgggtgttgggggaggatggcaatccatcttccagattcaaaagatggaactaaatggggctggctttctccaggtatcacctgactacatcgacctggcatagtcaagtctatgatggtaacacttgactgtgataatgccgcctgatttaggatgtcaagtacttggtactcatagggtgatgctccctatggcttttgggctgagttcagctgtgagtgtggctctctgtgctcagctctcttgttcctacacaaacaacttcacgggtctctgccagccagagcaccgagtcaagactggaatttgtcagcttacagacctaaccttgccatcctccttccctctctagggagcctacaaagaggtccaggaaggttttctttttaaaatgtcagaagttgctatttgttctcctttctcagaatagagtaatagtttggcacttctctcttgaaaaaagttgtgctcccaacagatataatcctggctgggtacatcttgggtaaggtactggtggaaaattttgtttgtatgatagattttatgtgtacagtgcaggtctagaagaattcacactaaactattagtggtgggtcatctccttttgggaaggcaggaagtaatgggagtgaaactaagtaactactgtcagtcacatttactccttagcactttggagtaaactgtggtttgattttattttgacagggttaacaaacttggacatacacacacatacataaacactcatgcaaatcaacttaaaaataatacaataaattttctttctctcttctaatttttcgttttctgttggatcattcttctctgtgtatactcaatgttctgttattcttcccaacttaaaaaaaatcccctcctgatcactcttcccacttgtgcttttattactccatttctttgagctttttacattaaaagtcctcaagagttatccatattcatttgtaaatcctttcctcccattttctcatgaatatatgctaatgatcccccatcccactcacttctactgctcttgttaaggccactaatgaatggcctccaagttgttgactccgtggtcattttcagtctttaccatacttgacccatgaacagctccttctgcctgagaaccctttcttctttcatcttccaggataccacactcttccagtttcccagctccctccctggcagctccatcttaagttcccttcctgattccacctcagctcctccccatcttaatgttaggtgctccagggctcagtccttaagccttttgtctaacatgatttcattagccatggctttaaatatcatctatgttaaatacacctcaaaatttttcttttagcttaaccctgtccaggattctaggtttatacactctacctcctatttggggtctccacttggatgtttgacaaatatgtcaaacttggcatactcaaaactggctcatctcatggtattctctcccaaatctgcttttcttatatttttctgcaaaatgataaaggataacttcaatcccttcatgctcaagagaaacccttgtagtcatccttgacccttcttttttctttgcattccatatttaacctatcagcaaaatttgttgactctaccttcaaattatatccagattctgaatacttctcactagctcttctgttgcctccttgggtcaagacacagccaccctttccctggattgttgtaatggccttttcactggacacctggactcagtctttgagaaccttcagtaattttcaacacagagtgatgctgtaaaactctaaaacagatggccactttgctcgcagccctacataagttcctcattgtactcaaattgaaagcaaaatccttgcaatccctctcacctcattgccctctactcctccactctccctctccagcctccaagctttctctagaacgggttgtcttgagatctttgcatctgctcttctccctgcttgggctattctcccctgcaaacacccaatggcttgcaaatttaactcatccaggtctttgactttatgttctattctcattgaggctttccatgactatggtatttaaaatagcacacagcttctcctaccctctctgtatttccgaaccttttcagcattttcttcttcatagcacttagtacaaaatgattagtgtcctagtgctgtgttacaaattagcacaaactgggaggcttagcgcaaactgggaggcttagcacgacagaaaagtattgccccatgaactgtgaaatcaaggtgctggcatggttggttctttctggaggttctgagggagaatctgtgctgtgcctctgtcctagcttatggtagtcaccagcaatcctaggagttcctttgtttgtagacacatcattccaatccctttcctccatcatcacctggctttcttccttatttgtctgtattcttgtatcttcacatgccctttctctatgaggatatcagtcattgaaattagtgcccaccctaatccagtatgacctcatcttagttcgactgtatctgcagactatttccaaatgaaatcacattcacaagtatcagggattaggggttcaacatatattattgggagagacaattcaacccctagcaccatatgacatacaacatatttttacttcattttttgtctttctctttatacaagaatgcaagctctaagaaagcccagagttttgtctgatttttttttcactgctatacctgggtgggatgcaacccataaagacttgttgaatgactaaatccctctgctagctcctcatgaccaagaggacgaaggtccaaacaatggatacagcattcatgctgttagacaaactgggcctcactgaagttttcacccttagctttcatcacttccctcagtatctcctgtttctactaaggtgaactcctggatcttactcaaacacgttcacaactctccttatttgctctttctctccccttcacccccatctactcctcttttcctctacaacacatatttctctgttaaaatcttacacattctcctaagaccagctcagttctcactctgaaaccttccatatgaacagttaacaacctctttttctgggtccctttcagttagttattatttttctcactagaaattttatcatcttagcacatgagtgcattggtgtagaatcatgacaacacaaatcttctccattcaactgggagatctttcagacaggggccaatgccttccttatctcttcatttttccttcagtccaacccccagcatctatccagtgcttggactgtaacagctgcatgctaaacacctgttgaccaaatgaaagaagtagggtagatttgccttcttaagctttgaagtaacagcaaatataattttggccactgggccccaggatatatgtactacatagttagccaataagtaggtgggaaagatgaggtttctaactaaggcattttggaagttacaataaacaaaagccttcgagaaaaggccttagtcatggtcagagagtgcagagagattagcaaaggagaacacaaaatagactactcaggaggacaaaaaactggacttaagctgtctaatagctaatgcccatccagtaagtgaagggcagaatcctcccacagccacctgcattattttctaaagaccatcccttagagctgtttttagaggtattttgagcattgtgggtgaatgtggcagtgtagtcttagatatagatgagaaggagtggctataaaaactgcaccttccaactataaaaacttcctggagtaacaattccctcccacaatgtaattgaaaagtgcaattgatcttatctttaaagagtgttctacaaaatcttagagtcattctgttagaataacttgaatgcttttaaaaaacctaattcctgggtctcatctaagatgccctggaatcagatctttgcagtagtgtactagaatttgcactggcaataagctcccaggaaaatatgagaatactaatatttaaggattcctacattaaggaaatccatccctaaatccatgtatatgatttatcatggtcagccattgtgttggttaattttatgtgtcaacatgactgcactaacggatgcccagataacaggtaaaacattatttttgggtgtctgtgtaggtgtttctggaagagattagcatttgaatcagtagaactagtaaagaatattgtcctcacagaatgggccagaattatccaatctgttgaaagctcaaatagaacaaaaaggcaaaggaagagtgaatttgttctctgtttgagcttggatatccatcttctctcaccctgggattttggtacttcttgttcttgggccttcaaactagaacctggacttatgccattagctccccgtgtgcaccctgctccattctcacgccttacttatgccatcagctccccctgtgcaccctgctctattctcatgcctttggacttgggactgaatcacaccactgtctttccaggttctccagcttgcatatagcagataatgaaaattcttggcatccctaataatgtaaaccaattcctataataaacctcctcatatatatatcctataagtctgtttcagtagagaacttcggctaatacaatcttattcttgaaaatctggaaaggaaaaaaatgaaaaaaaaaaacccacaagtctttgtatagatttgtcttcaagttagggtcttcttaaataccccctccaatagaactgctcttaaagaatagacacgcagaaagaagcctctaggctgaggcaagcaggcccacaaggctgaaacacagaatggaggagagcagcagttcttgagagcttgttagcaatcaaacctgaaggcaggcggggactctgagatgagtagaaactctgggcagccattcagtatacttttcagcaacccagaactaaatgtaggcttcagatacagagttatattatgggaacagcaaagtctttggactaacaaataacatggttgggatccttgctctgccaattacttttggttcagcgaatctgggtaagttatttacctcagcctcagtttccacatctgcacaatgcgaacaacatcaccacttggctggcttattgtgaagataaaataaaataaaagtgtgtgttggctgggcgcagtggctcacacttgtaaccccagcactttgggaggctagcttgtaatcccagcactttgggaggccaaggcaggtggatcatgaggtcagcagttcaagaccagcctggccaagatggtgaaacccctaaaccccttctctactaaaaatacaaaaaaaaaaagaaaaaaaaaaaagaaaaaaaattagtcgggtgtggtggcaggtgcctgtaatcccagctactcagtaggctgaggcaaagaattgcttgaacccaggaggcagaggttgcagtaagccgagattgcgccactgcactccagtctgggagacagaatgagactccatctcaagaaaacaaaaacaaaaacaaaacaaaacaaaaaaaactgtgtgtgatcacttcacatgatagttgaaacttggtaagtccctgaaatatgacatcttctagatttcttttccttgtctccagtaagagataatcagaaggtggtattgatttttaaaaaaaaggagaagaaaggaaagaaggaagggagagaggaagtaacaaaaggaggaaggaaaaagaaatagaaaaaaagaaaagatacacaaatagaagaaaattagcttggttcagagttttccagacaaaataagctactttcaaatatcatcttttactgaacatttacattaaaatctttaagcggtacaccatgccattgtagatttctccaaactaaataaaaatggtaactaaatagtagaataaggattactttctatagctgagaatgaaataatttgaaggtaaacattggaaagctcttaaagcatcctaaattgtcttttcttccttcaaatgtcaaaatacctatctcaatagatatttttaaattgcattcctctttcaagatccttctatcccttgtgtctcttgcttaggaatgaaataaataacttagttggaaatgacataatctctggtaggatgggagaggagtttaaataaattccaatttgaccgtcttctagatcttggtagatactgataatgctttgccactgagatttgtggaaactggagagaaaaataatctttgtagtgtgttctgctgttcccattacctattgctacataataaatcatcttcaaaattcagtggcttaaaatagttatttattattataactcatggttccatggattgactgggatcagctgggtgactctcacttggggatctttaatatggttgtcgtctggagatacattatgtgaaggttctctgggatggctgtctaagatggctcactttcaaggctgacagttgctcttagaagttggccgggagctcagctggtgctgccaatcagaataacaacacatggcctctctaggctttgtcttcttgggcatggtggctgaattctgtgagggagagtcccacaagtgggcatttcaagagacccaggtggagattgcaaggcttcttatgacctagatgtggaagtcatgcagtgtcacctctaccacattctgttacttatacagggctagtcaagaatcaagcaggtgggcaggtatggtggctcatgcatgtcatcctaacactttgggaggctggagaaggcagattgcttgagcccaggagctcaacactagcctgggcaatgtggtgaaatcctgtctctacgaaaaatacaaaaaaattagctaggtgttggggtgaacacccatagtcccagctaaccaggaggctgaggtgggaggatcacccaaacctgggaggtcgaggctgcagtgaaccatgattgcgccactgtgctccagcctagatgacagtgaggccctgtctcaaaaataaaataaaaccaaaccaaaccaaaccaaacaaaacaaaataaaataaaaaagaatcaagtgcacaagtacttgagtacacaaggacatcactactgggaagcatggttcattgggggccacctttggagactagctgctaggcttgcctacattataattaaactttcctacccataggagcatttctatctttgtcagatcaatagtagcatcacttaccatttaactacaaatttctaatggaagtttcacctgcatgtatgaaaacaaggtttccatcaaaggtaacaaaacaaatgaccaaaagtgtttttgctaaagaatttgtgaaagctttttcattagctgaacacccactggagacatcatgctttgagactttctgacctcaatccctagacagaaaaagagttggtgtctcccagtttgcaagcagtcctggggaagtaggttggcaccgatgaaccctttacattgattatcttaggcagctcaattcacttagttttcttcagttgaagaaaagggggtagcaacaccggataaattttaggggcacttctctcctgacattccattaatgtgccaatggcttagtgttttgcaaggaacttcacagaatagaacagttcggttaacttctggttgttgtaacgcatttttacttaataatctctcttgtctgtgtttcaggtcattcatggggatagagtaggcagggtgtgtagaatcttcttccatcacagcatgaaactgagtgaagacttcagaccatgacatctgcagatgttgggcttcagttgtgggttcgtaaattctcgagtttaagacttgttgccatttgctcaatatttttgatccttggcttcctcatttgtaaaaaataccaaacccataattttgttggaaggaacaaaggagctgaactttaagaccctaccctaggtctccctactactgggctattttgttgtttgtttgttttttttgccttttaaacctcgcttgaatgatttaatagttatggtgtacctgtagcttttagttaccacacatctctttgagaagtagtcagggtatgaataatacacataaataaaaaatgagtgaacagtatattaaagcaaagtaagcctgtttgaaaatttggactcaaaccatagtttcaaacccgtaaaaaatatttattgggtcactagtatatatagtgcactgtgctaggctctgtagaggactgaattcataaaagcaaaagctgcctttattctacttatccagaggttactgaatttggagctagttgacagttatgccaggagaacacaccagtctgcctgcctgtcaaggagagaattaaaaacttgtttctgctcagtgcacagcagacagcccggaaagagtcttatgaaccaagcactgcaaacaaggccatatctcctcctttccagatttttataagtaggtcaacaatagttcaggaaagatggaattccagatctaagaaaataattttgattgaaaaagatgcaaaaggcagtagagacaaataagagattccaatgattatcagtggtatttaaaacaaaacgaaatagcccaaaacaatcacatctactactacgcattcattaccacggagacactaaggatccaccgggccaaggtgccatgtggggactgaggtggtgtgtgtgattgggaggggttgttggtagtgaataatagggcttttagtaatgcacaaagggagagatgagacagatacccaaataactgtaattcaagagagaaagtgctaagtattaaagaagactgaagttctaaggaacgagaaatagcaccactcaggcaacatgaggaaaacctgttgaatggggaagtcagacttcagcctggccttgaaacagaggtggtaatagttagcgatttggtttggatgaataatagagtttgtgaatggaagaagtggaagaaaagtctggaaagaaggttgagaccagactctagagcatcttcaagattgatgtacagggtttacgttttacttggaaagtgttatcacgtaagaatgcagccagctgcaattgatggaaaaatagacagtggtttacatgagaaagcagttggtttactctatggaagaagaagtcaggaggcaggcaggtgagggttggtatggtggctcaggaggccatggaagacttaggctctttccttttgccccgccctgtcattctgcacaggtagctttcactctcacgatgggaatatgactgctcctcttccagccccatgtctgcactataagcaggaagaaggtttaagggtaaagggagggccaatcccctcccaagactgtcacctacatctcaccggtgaggaatgtatcatgccatccctacctacatggggggctgagaaattgagtattttctattttctgagtctttggcaaagaaagcccagggaaaaggtaactatgagtcccttttgagtagctagttcatggcattcgccagagaactattatggtttttgagcaggggaataaaacactgcttgatgattaatttggctgtaatgcatggctggacttggagagaatagttacaaagagaaagatgagaactcaaggtgcagagacatgaagtgccggattcatggtcctgtatgagtaagtggtggaactgggatttgaatccaggctagttgttcccagcctttttccacctatctctcaaagctactcagtaaggactttaacagaactatctcttatatagagccatctgcataaacaacaatgctaggaagccattaattcatttattccttcaattctgctttaattatgtatactgttgttttataaacaatcctgggagatagtataataaaaggaaataatgagaattcagagaaaggtagagataagttcaagtccagccatttctcttgccaatggtgtgattttgcatgagtcacataaattctctggctttcaatatccttagaggaataacaatggcagaaatgtataaaatgagataatcttgttatggcaaacatatggccaatatgggttagttggcccagcctccgttccaaatttattctccctagccaattccggctaaggcagttggtgtgttactattctggccaatcagacataggtgggatcagctatagtctcaatgatatttttacttttctgattcaggttcctccattttatactcctttcttcctgctggtgggcatgatggctggagttgatgcagtcattttagcacaatggggaaaagaccacgtgagtactagaggcttcattatgaataacattgaacaactggaacaacgctagcagctgcaaatcctcaaacttctcattatgtgtcaaaaataaactacttgtattagacactatggctttatttttcattacttccagttaaaaacacttaaaattgatagtttataaaagcacttggtacctactttatgcttaataagtgatgtttattattattcttgtcatcatcagtattattgttattgtttttataagttgcataatatcaagttacaggctaacagataaaaagactataatcaaaatacataaacaaatatgtgatatcctaacgaaaaaataaaaataaagccaccatgaaggattgagagtaacatgaaaccacactggttctgcgtgggtggaaattgtctgtacggatgttggaaaaatccacgctctaagtccgaagccagggttatagtaaagggcaatctttccagatgcagaaacatagcaaccatggcaggggatacgggaagggaagcatttctactggggtattttgagtgatgactgtaaaattagtgcttggactatacaagagggattttgtctctttgacttaaatacagtgttcagtgtttatggggataaaaagtagtcaaactaccaaagagagtctggtttctggtaaagaatttagaaataggaaaagctaaggtccatggaaatgaattctctgaccttcagacttctctagccaactactgagtgagataaactgataatctataatgtatgctaaattttcagaatgaaactaaagtgcaaaattgaattgtacgaacaatagacaccatgaagaattaaaaggcttattttttaaaagtaactccagtgaataacatagcccaggcatagatatgcttgccaaacaagcaattgacccagtaaacaacatggttattcagacaaaatcagagatcctgtatttgtgaggtcaatagatcaaaatttttatcaacttatctattgtctctatatattcacgtatacatttttgaaaaatatttgttacaatttacaaaaacacatatatggcaatagaataaacaataaaaaatttagaattcaagatagttgactatgcatgtctccaacctcatatcccattaaatgacataagatattcacaaagaggacaaaattataacaccactagaaaagtatagggagcttgtgtttggcagatctgaatactgaggaatttctgaaagctgtaaggcagatagcaacacattgactgagaatatcaaaaagctaaacaattcataacacaaaatggaagaaagaagaggctttctcagcaaaattctgggggactccaagatcagggggcagagaaaggtgagggatgactgaataaagagacctgaaagagctgtcccgttcaaaaggctgaccccacgtttgtcccccaagcaaagctgaaagaatagcttcctgaataaactggtgaatcatctgtgagaggtttccagagtgggcactagcattaaaaaaattgcagcactgaactcccaagtaactttgattaccataatgggctactaaaggataaagtgtcatacctcctaaagaaaagacttcccagtgccccaatccctgaaaggagccagggcttctgtcttaagaatttatacccattgttggagatacaatttttttcatgtaaggagaattacatttcaggaaccaattctattttcttagatcctgatttataaatgtaaataagtaattttattcctccaaaggaatgccaccctgttgacatcttgattttagccctatgaaatccatttcagattctgacctctaaaaaattaaaataatgaatttgtgttgtttgtagtcactaagtttgtggtactttgttacagcagcaataggaaactaatacacatggagaacagactcaatagacccaataactctgtagtgagaaatcacaaggaaagaaagagatacagatggagggtatgatgtaatcaaataaataatagaaagactgacttgaagctggaaagggacttgagttttcagagaagaaaaggccaactgagtcccttatggcaaaattgtaaaaaaattggaatccctaaggataaagaaaaatcttacaagctcccattaaaaaatacattttttggtataaatgaattattattctcatcactgagcccattatttatttgagctaagtattttactttaatcttcaccacaccaggaccctataccacactcttatctacttgcatgcggatatggaaaaagaggatccctgaggttatgcagttctacagttagtaagtggtagaaatggaattaaaagtcaagttcagaaacatgggattctgaagacaattacattatttgctagcatcaaacttctcatttacaatacagaaaacaggaaaacaacagaccaatgcctgtaaaaagttaaagaagtacgttttcaagctcaagtcctatcattaaagtatggggcagaggggaatgacatttttagacatacaagaacatagaaggcttaccacccacataaccttttctgaaaacaaagcaacaacaaaatcttcaggttgtacttcagcaagataaagttgaaaaacagaaatacataacataccaataaaatgagcaatgatatcagtaaaacttatagttaatactaagtaatggttgaaaatatggcagtgaaatttaatggaattgttaagtaggtagtcataaaacagaagaggcacaaagtaaaaaattaacaatctggaaccaaaattcaagataatttttaacaatatgaaagaggtagtaaggaagaaacaaagggaagttataaaataccaatgatacaacctgtattttgtttaagcgagattgttgtagacactgctttatttttatttggacaggaaaacaatttctgatttcggcaagtttaaggatgttcactagcagaacaaaaatgtaaggtgaaaatttcaaactactatgaggtaaactgtaaataaaaaataagaaattaaagaataaaaacataaaataagaatatatgagacaatataatgaatatcagttgaatttttctaaactattctagaaataggcaatgttccatgttatttttttaaaaaaatcaacttcatcaaggtattatttgcatacaataaaatgcacagatttttatttatttattctaagcttttatattgggttcaggggtacatgtgcaggtttggtatataggtaaattgcatgtcatgggagtttggtgtacaaattatttaatcagccaggtaataagcatagtacccggcaggtagttttccagtcctcatcttcctgtccccctctaccctcaaggaggccccagtgtctgttgttcccttctttgtgtccacatatgctcaatgtttagctgtcactcatcagtgaaaacatgtggtatttcgttttctatgcctgaattagtttactgaggataatgagttcagctctatccatgttactgcaaaggacatgatctcattccttttatggctgtgaaccaaggtgtataagtaccacattttctttctccagtctaatgttgatggacatttaggttgattccatgtctttgctattgtgaacagtgctgtgatgaagatacgcatgcaagtgtctttatggcagcacaatttatatatctttggttatatacccaacaatgggattgctgggtcaaatggtagttctgttttaagttctctgagaaactgtcaaactgtttccacagtggctgaactaatttacactcccaccagcagtgtataagcattcccttttctctgtaacctccccagcatctgttactttttgactttttaataatagccattctgactgatatgaggtggtatctcattgtggttttgatttgcatttctctaatgattagtgatgttgagcattttttcacatgcttgttggccatgtgtatgtcttcttttgaaaagtgtctgtccatgtcctttgcccacttttaaattttttttttaatttgtttaagttgcttgtagatgctgggaattagacctttgtcagatgcatagtttgcaaatattttctcctattctgtaggttctctgtttactctgttgatagtttcttttgctgtttagaagccctttagtttaattatatctgacttgtcaattttgttgctgttgcaattacttttagtgttttcatcatgaaatttttgccagagcctatgtccagaatggtattttgtaggttatcttctagggtttttgtggttttaggttttacatttaagtctttaatccaccttgaattgatttgatttttgtatataagtgaggggcccagtttcaatcttctgcatatggctagccagttatcccaacaccatttattgaatagagagtcctttctccattgtttttctcaactttgtaggagatcagatggttgtaggtgtgaagctttattttgatctgtctattctgttccattgttctgtgtgcctgtttttgtacttgcaccatgctgttttggttactgtagccttgtagtataatttgaagtcaggtaatgtaatgcctgcagctttgttctttttggttgtgattgctttgcatattcaggctctttattggttacatattaattttaaaatggttttttctaattctgggaagaatgtcattggtaatttgacaggagtagcattgaatctataaattgctctgggcattatggccattttaacaagatggattcatctatacatgagcatataatgtgttcccatttgtttttgtcatctctgatttccttgagaagtgttttgtaattctcattgtagagatcttttacctccctggttagctgtattcctaggtattttattcttttttgtggctgttgtgaataagatcatgttctagatttgactgtcagcttggatgttattgatgtatagaaatgctattgatttttgtacattgattttgtatcatgaaactctgctgaagttgtttatcagatctaggagcttttgggcaaagtctatggggttttctaggtatagaatcatattgtctgcaaacagagatagttggacttatgctcttcctatttgggtgtcttttctttctttctcattcctgattgctctagctgggacttccagtactatgttgaatagaagtggtgaggctggacatccttgtcttgttctgcttctcaaggggaattcttccagcttttgcattttcagtacgatgttggctgtgggtttgtcataagtggctcttattattttaaaatatgttttcacagtgtctggtttgttgtttttttaaaatgttgaattttattgaaagccttttctgaatctattgagatgatcatgtagttttttagttctgcttatgtgataaataacatttattgatttgcctatgttgaaccaaacttgcatcccaggggtaaaacctactttatcatgatgaattagttttttgatgtgctgctgggtttggtttgccagtattttgttgacgatttttgcatctattttcttcaaggagagtggcctgaggttttccttttttgttgtgcctcttcctgtttgtttggtcagaatgatgcttgcctcgcagaatgagttagagacaagtcccttctcctcagcttttaggaaaagtttcagtaggaatggtgccagctctttaacacatctggtagaatttggctgtgaattcatctggtcctgggctttgtctggttgataggctttttattattgattcaatttcagaactcattcttggtctgttcaggtattcagtttctttctggttcattcttaggagattgtacatttccagaaatgtatccatttcttctaggttttatagtatgtgtgcatagaggtattcatagtagtctctgaggttttttttaatatttctgtggggtcagtggtaacgtcccctttgccatttctggttgtgtttatttagatcttcttttttttctttattagtctagctagcagtctgtcaatcttatttgttctttcaaaaaaacctcctggatttatcttttgtatggttttcccatcttaatttcatttagtttagctctgattttgtttttttcttgtcttctgctagctttggggttggctggctcttgtttttcttgttcctctagttgagatgttaggttgttaatttgagacctttctaaagttttgatgtgggcatttagcactatgaatatttttcttaagttggaactgctttagctgtattccagagattctggtatggtatatctttgttctcgttagttcaaagaaaattttcaaagaattttttaccttgattttgttgtttaacaaaagtcattcattcaggagcaggttgtttaacttccatgtaattgtatggttttatgtaatcttcttagtattgattcttatttgattgcactggggtatgagagtgtggttggtaacatatatttttttgaatttgatgatgatattttaatgtcaattttgtggttgattttagagtgccatgtgtagatgagaaaaatgtatatactgttgtttttgggtggagtgttctgtaggtctctattatgcccatttggtcaagtgtctagctcaggtcccaaacatatttgttagttttctgcctcaacgatctgtctaatactgtcagtggcatgttgaagtctcctactattgttgtatggtaatctaagtctcttttaggtctctaagaacttgttttatgaatctgggtgcttctatgttgggtgcatatatattcaggttaggtcttcttgttgaattcaacccttagccattatataatgcccttctttgtattttttgattgttgttggtttaaagtctactttgtctgaaattaatatcaactcctgatttgttttccatttgcttggtagatttttctacatccctttactttgagactatgggtgtcactgcatgtgagatgggtctcttgaagatagcatatagttgggttttacttctttatccaacttgccgctctgtgccttttaattggaacatttagcctgtttacattcaattttgatatgtgtagatttaatcctggctttgtgtcactagctagttgttatgcagacttgattgtatagtggctttatagtgtcaatattctacacatttgtgtgttcctgtggtggcccataatggtctttcctttccatatttagcattcccttaaggacctcttataaggcaggtctggaagtaacaaattcccttagcatttacttgtctaaaaagattcttatgtttcctttgcttatgaagcttagtttggcaggatatcaaattcttggttagaatttcctgtctttaagaatgctgaatataggcccccaatctcttctgggctagggttcttgctgacagagccactgttagcctgatggggttctctttgtaggtgacctgccccttctctctagcttactttaacatttgtttctttcatttcaaccttggagaatcagatgactatttgtcttggggatggtcatcttgtatagtatctcacagaggttctctgtatttctcaaatttgaatgttggcctaacaaggttggagaaattttcatgaaccatatcttcaagtatattttccaagttccttgccttctcgctctctctttcagggatgccagtaagtagcagattttatttctttacgtaattctatatcccttggtggttttgttcatttttttctttatttttgtctaagttattttggaaaagcagtgttcgagctctgcaattctttcctcagcttggtcaattctgctgttaatacttgcaattgtattataaaattctcgaagtcatttttcagctctatcagatcaatttgattatttcttaaaatattcattttgtctttcagctcctgaatcattttgttatattccttagattccttggattgggtctcaactttctcctgtatctcaatgatctttattcttatccatattctgaatttaatgtctgtcatttcggccatttcagcctggttaaaaaccactgctggagaaccagtgcagttgtttggagctaagaagacatcttggctttttgatttgccagagttcttatcctggttctttcttatctgtatgggctgatgttcctttttatatttgatgttactgtcctttggatggatttcattgcttttttttccctttgatgcctgtgggtgtttgattgcggtataaagtgggttcagtcaactggcttcatttctggaatattttagggggcaaaggctcagcttagtatttctgggctgtatgctctaactctgggggcctggtacccagcccccagctttgttctctggtcccttgaggttagaaagctgctgtacaagaggggctgaggtattccctagccacaatactccaatagggggtgccagccaaagtgttttgttggggcagtggccatgggatctgtgctcactcacacatgccagcaactgcagcagcatcatggggtacacgtgttggctaaagaaaggtaccagtgggagtagggtgtcagtgttcctgcatgtacttgcactggcagtggtggtggtgtggcagggatggggtactagtctgaattttttaatttaaaggactctcagtctggagctgagattgcgccactgcactctagtctgggtgacagagtgagactccatctcaaaagaaaacattaggtacaccatggtaattttaataatgatgacaatgttgttgttgatgatagcagcagctaacatttattgattcctcattagaaatcattaggaacagattcaccctctcattttgtcctcacaacaatcttacaaagctaagttataaagttagtataagataatgttaccaagagtttaaaataaagtggagaaatggaaaaagcaagacagaaaattttatcttttataagggaaaacaacttactgaaaaacctggaaagaaatacagtatagtactaatagctgctggttctcaaaggtaaaactatgtgtagtttttcctttcatcttttctgtcttatttttctcttataagcccttgttacaaggggaaaatacaagaaaatgtatttaaaataaacagacgatgtgcaatttcatttctggagatgactaggcaatgttttttctcaaaggatcttttggggcctcgagaaaacctaggttagattttgctattcatcaggtaaaaatgtatttcctaccattctctgttggaggcaccatagcagaattcagcaaaagagaaacatggttatagattgctcagagatagaaagatgtctctgatgagtgataatgtaaagaaataagtcacctcaggtgtcatgatgatttatgcttttctcagtaaatttaattttatctttttttccccatttgtgccttacaagagccctgagagactaggacaccaggcattatcaatgcccatgttacagaaaatgaggggcagtgagcatagttacctgccaaggccacacaatgagctagtaaaaacctgaacacagaacacaatcttaactcttaactcagtgctttcttccatgacaacagcttatctgggagccctgattcctcttggcaggaaagacaagcctatcaatatatcagctatctaagatatttatggatgaagattctgtgtaatgtctgctgtaaattcagtttactacaactctcagcaaaatcaaaggaataccagttgtatcccaccttttactctgccattcatgcaacactcattgattgcatgcagagaactatgaaagtgttaggcattcagtgatgcttgtcttcgggtagcttatagtggggaagcagttaatcaaatctagaagtataacacaatggaatcagtaacgtgaaggagacataatgaagtgtcgtggctctcagaagagggacacgctgctcatcattcattgactcattcattcaacaaataaaaactgccttcttgttgccatgctttgtgttgaattccggggatgcacagttaatacagacacatgatatttatcctcaaggattatcatctagtgggaaacttaagattgaccaaatgattatacagacgtacattaaatcagaagtgataaatatggcaaaggatagttagtggtgtaagaagcatgtgatctagggtgagtttcttctgattcaagggtgagtttctttacagccctctactagaacatgagaaattttgtatttcctccaaggcttggctattcaaaggagagtttgcaggtgctgattggaagtggcttacttaatattgcttatatcctttattgtaataatctgataggctatttcttaccacactgccgcttccttttcctccttcacagccctgcatatagtagatggtaatcttcctgttctcagtttatatatggagtgtaatgttggactgttcctctttgcccaatgagccaggcaaacactaatggagagaaaactgcaatcatatccacagtgttcatagtaaaacattagatcccaacctgaagcatcctctgctgagggtagcagatggcatcagggtgcctatgttagaagtaatgcaaacctgattatactctttctaattttttcccctcctacatgaagcatgctgtagccacctcacagaatatggtgatgtgtcaaaacttaattagccaacacttgtaccccatctacattatgtcaaaaactacactttcaagaacaagagaagagagctccaaaatattctggcaggcagagaattcttagaacacaaagaaagagaataaggtagtaagctattttctattatcaaggccttaattctttcttggataatcagaaatgggagaaaattttctgggttccctggatgtaccagggttgccatatcttctatacaaaaatggaaaaatctatgacctgacatgtatgtgggaaacgtatggtctggtgtgcatgtatgtgggactagaagcaggcatgtttgaagtaaatacagtttctgtttatctggtatgcatcacagggtgaccaacccaccctgtttgctcaggatggaggggctttctaggatgcaagaatttcagtgttaaaactgagaaagccccaggcaatctgagataacccttgatgtatgtaatgtatggctcttaaaaaaaaaaaactcttattatattcttagaaggtcatgttgaccagtacagtgctgtcgcctttgttctctcctttgaccaatgtggaggaatgaggctgcctgcttacaggaatatcagagatctttctaattcctaaactggctcatctatccaaacccctcacccctctcccaccatttttcttttcctcaggcccagctccttgcctcttaatggtcatgctcacagctttggggctgaatactcaattagccactgcagcgcaagaagagtcccccagcttcatccatcctttatccatgaagaaggcccagagctccttttatatttgctagggatttttcaccagagtatagaaaaaaagtcacgtgatacacttttaagtcataaaaaggacaaaaaactcacaataaaaatatgcatttggaaatcttatatgcataaggagcaagttctagctcagtttgtttatatattaagttcatgcccaagagggtcaatgccttctctaatctatccctaagcccctttacctctattatttgcaggcttggtgagggagcctctatcctacgctgcttctgcttctcatgcctatcggaggcaatgcatgtaatacaaaccctatggaattgggacctctccagcttgttcagagctggttgaagctccttgctctgccactttttagttcagtatacttagatgaattatttaatcctctaaatctcagttcacttgttacattttcacagagacctagaaacattaaaaaatactatttacatgttcccaacctcctaaggtggctgcttcgtttgctctcacattcagcacgatagataattgtaaggcatacaagaatttcaaccatcaaaggtgtaagtaaattctctatattctcttcatgatgacaaaataagcagttgaatatttgccctaagattggaaatcaaaaagtttatccatcagtgctccataaattgcagttgacgcttccctgtggcactaagacagctgtcaaggtggaaaatggggcttaggcttggagataggagtctttgcgcaaaaggtttgcactgcctcaggtggagttaattctccctgacctcataggcccattgtaaagattaattgagaagtgatctaaaagtgtatgacacacagagtaagctcttgactgttggttaagttgggcacacttcttttctcctgttggcacaaggcatagaagtgccacatgctagtaagtggaatttctatcattttctggctctcctccttacctgcttagagtttatggcccatcatccctatcagtcctttttttttttttttttttttttttacaactctaccctttgctgctgtctttcatcaaacaaactcacctgtcattccttatagctggttggacctagctctctgccttctctgttcttatccccaggctatttaatgaatctggataaagatatacagttatcatttcatctgtaaccataaatctcaagtgtgtttcaccattctcccacattactctagtcaactcacgctcccacattcagggctagctattttattatctgccttccccatcacccaaatttccaattcccgctcctcactctcagttgatgaccttgattctcatttgagaatataaagcagggctactttatcctcccacaaccaaacctacttccccagctgtacccacacagaaaccctcctctgtccctccagttatgggggtaagctgtcccttcacctgctggtggccagcacctcctttcttggataggatcctacattatcttgcgtggaggaggacttgacacctacagagactctgtctttccttagcatcaccagtgaattggattattcccatcagtacaagtatatcctaatatgtcctggattaaaatatatccttattttgatccctatttctctctagctagcctacccccattttgtgctcccttttatgtcaaaaaatttttaaatagttttttatactgtcttcgctatctcattctatattcatttatcaaccttccaagcaggtttttccccccggtattccactgaaactgctcccatcaatgatttctgtcttgctaaatcaaatgatcagctaattgctctctccaggaaaaaactttgttcttcttttggcttttatggcaccacactttctggatgtccctcctttctcaccggatgtgccatctcggtctccattgctggtgccttccctgcctgccaatctctaaacgtcaggataccatagcactcaattcttagccctcttttctaactacattcactccctggatagtctaatgtatgcccatggctttaaatatttgttatatgccatggaccaacaaatttatatcttcagccccactttcttagtttccagacatgtattttgcctatttgacatttctatttgcatgtttaaaaggcacctcaaactcagtaactccagattagaattcctgatctcccatccctgccaaagtccactccttcctcagtcttctctatctcaatatatcaaagggccattcactcaatgactactctccttctctcacaaccaatgtccaatccatctgcatgtcctgcttgccctacgtttgaaacagatattgcactacatcacttatctgcaccttgcatcaaccatgtcttatgtctcttccagatgacacagtggtttcctagtgttttgtttccatccttaccttgtacagtcagcttcacacagcacacagcagttggagtgatctttcaataacctgtaccaagtctttccaatatctattgaaagctttctagtggttccctgtaacatcagcattaaaaccaaactcctttccatagcctatgtggctcttgacaatcagacttttgaccatttttctgtaacctgaattcgccctctgctcactgtcctctgttcatagtgaccttcttcctgtttatggaatgtgccaagtctgtaccacctgatggtctttgagcagctgttctctttggctcaataatcaacttcctgctgttcacttgcttactccacttaggttggctcaaatgttggccatttgaggaagaggaaggaagaggttggctcctcttccttcagtggggccttcccggctgccccatctaaaatagcaaccctggccttttttcattctgttttatttattaacttaccacattaaaaatattttacatatatatgtatatatgtgtgtatatatatctacgtactttattggtttaatatctgttcctgaccagatccctcttcgaggctgaaggacttattcccccaactgctgggagttctcagtggccatctctttcccaggattgtctttagctgataagagcccctgtgcaagatcgcacctcattcccagtgagcccacagtcaatgactgacctatacacctgtctaaagatgagggttccctcgccacaatgggggaccattttgaagggtcatcccagtttcagagctttccacgaggtcagcttcagcctttgttgagcctgcttcacggtccattccttctttcttccttttccccgcaggacttaagcccaagagccctttccaatgaacttcctgtgcacaatgtccatgtcagaggatgtttcctggggaacctgatctgtaaaaccttcatgaaaacataaggttcaccagtgcttagacctcatctgtctaattttcagttatcttcccagagcctaaaacagtgcctggcacatagcaggtgttcaataaatagtgagtaaatgaatgaataaagtagaagggctgggatcagacccagtcctgtgtgatctcaaaggcactgtgttctctgacccacaaacactaccatccaggcaattccaacttacaattagaaattcagttccatttgaaattctgcccttgcttctgcatgcacctggtaccagatgaaacttgcagttagttaaggcacacagattaattgaaagaactcattcccacaaatggtgaccctgggagagctcatgcatggcagtgtaattactttggtcatattgacacatcaggagagcccagagtcaggctcagcctgaggtttccatctgaactttgcatttccgtaggcctctctcccttgaagtcaaatgacataattttaacaaattttgagtgtgtgaataatttcttcttttcttctgccctggtatgtatactgatattaaagactagaatatttatcatgttggcagttcctgcctgctagatttgattttgttaagaagccgagttttcctctgacagcattcaactccacatcttcttattcttgacttccactttagacactttggtattagctagctctacaccaaaataaaatgggagggagccaataggaatagctaagtatactgaccacattcattcctgactactggggaaacacaaatccagttactaaataaaaagccagttcagataaggaatgatgctatatcttccaaatgactcctgtcgcattcactggattaaaacccagagcgtcaccacttatattccagtgatgtatttagtaccctactttaccaaatcactaggaaagccatggactgtaacatctgtccaaatgcagagagaatcaaactctgattatgctaatctgatatcgacacaaagacattagtaaaataggccactctcactgaataaaatgtccttggctttcataactgattttttgacgtcatctggttttctgcaaaagccagagatagagctgcttacatttcagggaagactgtacctccagtgaaaacatgctccagcgcacatgatatttcaaagcagccgtgctatctttccatagccactataaatgtgcaggcacttcctcgtcacaggtgagatagaaggtgaaaggtgtactgagatatctctttcctagcctctgttaaagacaaaaaaactcattttttccagctaaagcaataccaaagatgactggatgtcatccctggttctgtagaattacactgaagggggagctcagagttctttggaactggaggtcaggcttgcagaattagtcactatttatctgaagaccgagaatccagcttgttaccatgatttcaaggaactgaaagccacacaagtcaggtgaaattcagaggtaaatgctacaaatttgaaaaggggaagctcagtgtcctctgctcttttttcgagctattttgagacatgggaagacactaaagaaacatggcaagtattagaaataaaaagcaatcctttataagaacaaaattacagtgttgagatgaaacggaacctgtcaatttccaatcatctattcagaggacaaagaccccatttcagggaatcttctacagatgttcttttgatagctttttatttaatagtcaactggaggctcagctttttataatttagtttcccagaaaaagcatcctattctcttagatcatttagtacctctgagatttgcagtattcactcttccgcaatatttgcatctcatcgatgttaactgcagaaagtaacaagaatgtcgagaaagactcctttcttcaacagcctgcctgccatcccataaccaccttctctattttcactgcactggctcttttaaactactgcaagttcttccactctgtaattggaaaaatttttcgcttcaattttaaaaattatagacatgtaataaaatgttgccctgcactgcttgcttaatctatctgctcctcctcttatcgtcatcgtttcttttcacatcctggtgactgaagctgtttaaaccagatgcaccatgagaagcagggtaataggaatgaataacagaaggggaggctcatgtccttttgtgggttcatcctggaaggtggggggaggagaggcttagagaggggcatggtgagagggcagcattagagacaatgtactcaatcccccttgatcctgcccttaagctctttcagaaaacttaatctccaaagatttagtttaattttgattataaacaaaatatccttctaccaatggtaactgataacaacgaaagagcagggaaacacaccagctgatgtccctcttctgaatcagctgttcctgatggtgcacagcttcacttaattgttttgttcttccttctaccctgcctcattccacaagagttgttatggcttacaggataagaaaaacatattgtatctaacattacgtttaacaacaaaaacaacaacaaaaatcgaagcagattaaagacaaattcagatagaatggcaggatctagagtaattcaccagtttataaagttcctctaactttattacaagtgaaaatttggttctgaaggccttgacactcaaagggaaatggacaacgtagttacgccgttcttgcagagaggaaaaataaaacacatcgattgttcaaaggaagcaaggtttttcctagcaattagggttaaagaaatttctcatctggggcttccttcaggaagacccaatgacacaatgtcctttacaaaatgccaacagcaattcccccaaactgctcataaaattaagttttgcaaagcaaaatgaatcttaaatgtgtttgtcattgcagggaggggacacatttggtctgtaagttatcgcctttcaatttatcacttttgtcaagtctgaactgttctatgttaaattttcaagtaaaagccagtctctgcagtgaaaagaatgtgggtggaagacataggtgataatgcaccttggctagtggaagaaaagtggagacggctgtgggccgattttgaacctaaagcattatgtgacattacgtggttccacttgcccctccaggcgcttttaatctcagtcaagaggccatgctctaggtagctgctgcctcttcaccctgggccatagaatacatctgaccttgacttgaagcttgaatcagacctcccccagcagacctgaagactcatgagcaagaaatacacgctgatgttttataccactgagatttttgtggtggatagatagcgttattgcggcaataacttactaacaccctgccttgacgacttcatgaagttgtgcagactaagtgagagaatgctcttggatattattcgcatatccaaattgaatgagcaaatgaagagttagagaaaatgattcattctgcatagcattaccagatccattagttgacatgttatatggatgcttctgtattgcaataggccctggttgtatttggtctgccaagcaggaatgaaacactgagttgagactgctggttggaatgatacaaaaaggacaatcgagaagtgcaaaagaatgagacagaatagtaatgagctacagaaggagtctgaaaaccaaaatggaagtctagttggtctataattaggcactaatcatctgatatgatggagatacctctgcagaatctgtagaattttgaattatctacttgtcattttctggggaacatcatagaagtgataatgaaatcactcaaatttctggatattcttcaacctagcttggccatcctagtccaaaaaaatataataagcatttatcaagcaccgacaaacaatttcagtgcatattaattgggcacctactatgtgccaaataatttgcagcctcagagataagcaaacagaccattagacatggttaaatgtatgacaaattataattacatgagcaattactttagtaattcatgtaaattactacacttcatgaagactaacaagtacagatatcacattctataaagcccacaaatctagcacctatttcaccatgttatatgtagcaccgttacctcttttgtggactaagtagtatagcaaacttgatggaataaataacaccgacttcaaatcacaagggtattacatgagtagcctctactgacataatttcaagggtcagctatttctctgtaaaattaaaattaaattctgaaaacactatgtgctaggcacagtaatgggagcattccaataagctgtaatccttaccaccattttaaaatattagctccagtctacaagtcaggaaggaggctcaaggaggtaaagtaacttgcttagggacccctggagtccaagtgcattccttgttttcatgcatcctgccaacttcatagtttatttactgtgctccatatggtgcagtcactaccaagcaaatggcaatgaaaaagaaaaaaagaaaaaaacttgcctgccatttctcttcttcatagctagtgaaagagtttactaacatcagtgtcaatgatcataaagctaaaacgtcctaagccttaaatttgcttttcaaataccagtatttcagaggcagattacctgactccaataatatgcctcaaaccttgcactgtgtgtgcaatgaaagggaatattttcatccattataagaggctgtcagaggaaaacattttcctgatatcatacccaagagaacagcatgtgaagcaacactatcatattctaccgaactttcatatactccatgcagtacaatgtatattttatcttttgaaaagccttggtaacaaaaggataaaatatccatctaaaactcaaagtacattctaataatgctgcattcacattaatagcattcaaagaatctcatagccttctgcaggcagttcacttgtctgtgctaagaatctatccttcagttacaggaggaaaagctcaacccagtggctttgcccactctttatagctggggaagaggcagaagctaaggggcagtgtggaaggcatccattaactaagtcttcctcctgaatggcaggctagtgggaggaatttctttcccgtgcacagggagttaagtcggagctgaatttgcatatctctttagaatcacaagggtattgattctagcctctaagacatttacataaaggtttcaggacactctcaggaaatagcaaaggaaactttggaactgagagtgagaatccccagaaaagcaggggggaggaaatgcaccaatttttggcagttgaagaactgaaggcagggtgagtctaaagacatatatgcctaggagagacatctttgtgttggtgactcagtctctgagtctcacctggtgcagttcactcaaatggtatcctagcaagtcttcagggatcctgttttaaattgtttgtctgagatttttgtgaaatttgggaaagccatgccatcttctgggaaactcgaaagaagactaaagtcccttcaaggtcagacctttcaggcttgggaacaatttatttgctttggagaaataccactgtcatgatgggagtagctgtgtcatgtttcagcagtgcttgcaagagtggagtgttagagaagtccgaatgaccgcacctccccaagcaccagcctccaaggaaacatatgtctcccaggactgtgcagaagggatgaccctgggaggctggggtaagctggcagcaacagtgtttggtggggatgctgagccaaataccattgcaatcaaagcctttgatcatcctcttgttggtgtgacttgggaactgagggtcacccttgaattcctttcagtcttaacactgaactaggagaagcacaaatcttaaatttccatctattaccattattattatccacagagaactgagggcagcctgagaaatgaatggcagagatgtgtcagctttgcccctgttaaattatgcacatcatatgaaatgacttaaaggatgactgcctaggagaaacagagacaggccatttacactggccagtcctttgaggctcatgactttaaaagttattcctgatccactctgagccctgaggaacttggaaatgtgcctattacggtttccaaagtgcaatcatgcttttggggtgaacaccccagctgcaaaaacagtaaggtctgtcctcatttcacagtaagagacagagccaggaagagaggctgcagaggagacagagagagcaccattgccattttttacagagaaaaagcatacatatcgtgacctagaaattaaaactatgtgttttcccctgactctatggctgccagaactgcttcagtgatgacaactatcttgggcattttatgtgccatttttttgatggaacgtgtaaaaaaattaactacccattcagaaatgaaattcactatgtgatttgccaccttgccagggaagagagcaatggtcagataacaaaacagacatgtaacaccactcctaaggataaaatacgtatagtgctagagccaaaacaaacaggctgcagagatgcaattaataggctgaaatatggtggtatcagagcacccaccatccctcatgctctcaaaacatggcaaagagaaggaaattggctgaaggtcagggctcttctgacccatgctgccttcttcctaagcccttgatatagatggaatgtatttctcccctgtcttcagtttcagtgcaatgttctgtaaaggaaaccagttttggagtcagacaacctaagattgaaactcagctctgtttcttgtcatctctgtaactctgggtaaattatttaacaactgcacatttcagtttcctggtttgtaaaactggccatctgaggtcatttggggaactaaatgagataaaatatgtatgtataaatggcagtagtaagtactcaatatatttagttcctttcccttttttcatctatatgtaattccaggatctggggtattttagaattcatctatttattatttcattcaataaacatttattgactgctttctgtatattacatactttgctgctaaccagatgctgacacagccataaaaattagtgggccaaaaggaacccagactgtagattgaaaggggtcatctttatgcacatcttatgcctcatatctgttgatgtctcaagcatcctacagggatgttacaccatccacgtaggaaataccagatctcacggtaatcggcaaggacaatttgttcgtcaaaacagattttgttgctcccacttgaatgcctcctttagaagtctctgttattaattcacctctgaaaggtgatcaacaaactcttacattcttccctttggttaatagattgattccgatctattaaaagtcaaattaaagttctcaccaagtgtgtaatcctgggagtttgtgtaacattcagctttcccatgtcttcacaattcttttaattttatatttctaatcacagaggccaacaacacagaacagtttgactatattaataaaattacttatttatatattatctgtgaccacttcctttcccccattacattcctccaagtggataacttacagttattaactttcaggaggcccctatatatcatagcatcataccattaagccttttggaaattcatcacaaatcagtatacagatgacattgatgtcttattgctattcattcctcccgggccgtttttagcagttcattttttatatccctgcagtgcagaaatatggctcactccagtatctgtcctttttgtaatcgcaaaaggaaagcttggcagttgtcatatattacactcttgaggaaaatgctagtaatacgtcgaattgattgaacagcatggacccaaactgcttggcatagggctatttcctcactgctattaagattttggttaaaaaaaaaaaaaccttaccttttagattcagaaactgtgaatcattaaaaggcaatttgtagaataaagatcacatacttgaagaagcctaaaagctcccctctatttcctctctttagattttgaacgtatttccagcatgcattcacattgttgcatgctacgctgctggaaacagtgtcattggccagaagctggttgccacctgggttgtgaaatagcccaggacttcccaggctctggaggggtagaagcttaaactggtaaagaagttgagaacattgtgactgcaaaggcattaggcaaaagccatacctatatgccatccttatcattgcaaaggtgccactagaaggactatggtcttggaggaggcaagcaaagaaagaagattgatatggtttggctttgtccccacccaaatctcacctggaattgtagctcccacaattcccatgtgtcatgagacggatctggtgggaggtaattgaatcacgggaatgggtctttcccatggtattcttgtgagagtaagtttcatgagatctgatggttttataaaagggagtttccctgcacaaattctcttgtctgctgccgtgtgagacatgcctttgaccttccaccatgattgtgaggcctccccagccatgtggaactgtaggtccattgaacctcttttcccttataaattacccagccttgggtatatctttatcagcagtatgaaagcagactaatacaaagttgtattaaaagaggaattaagatgaaagtaagaaaagtcatagctccatataatcaagcctatgctctcccctgcccctcatctttggaatgaggtagtgccaactgggcctgggggacctgaaatacagggcacaggcagttccgttggaatcattcttcaggaggccaaaccatggccaccggagtcctttccgatatgaatatttgtaactaatctgaggctttctttccaacaccagctacaatagttggtgatccacctgggtttactttttaaggccactagacatgtcccccagtttctattaattttgactgcaatcaactcacctttcttctgggaattgcccttgacctctaagaacagtggtgtgctgtgtgctgataaatctctatcatccagctctccagataaaaaagggggcttatatgtagcatttgcagatttctgtggtgttaacacccctaccatggtggatttcaagtcaccaccttgatggcacccaatgtggaggtgggaatagatacacatgatgggctctgaaaggcaggataagccagctccttaaggataccactgtacaggagacaccttgcctgggaataccagggaagagatgtgcctttcagaaggtactgaaggctgcctccctagaccctaggagtgcatggcaggatgagagcactttggtgttattcacgcttaggaggtccctgtgtatgttaagctgttcttgcattgttatacagaaatagccaaggctgggtaatttataacgaaaagaggtttaagtggcttacagttctgtaggctatataagcatggcactggcatctgcttagcttctggggaagcctcggggagtttttactcatggcagaaaaagtgtcagcagacaagtcacatggcaaaagcaggaacaagagccagtaaggaagaagatgccacacatttttaaacaactggacctagtgagaactcactcacgagtacagcaccaagaggatggcactcaaccattcatgggaaatccacccccatggtccaattacctcctgccaggccctaccttcaatattggggattataattcaacatgagatttggagggcacaatatcccaactatattactgtgggatcaggctatggttggactccagttaaactatcatctttgctgaacttctccccaggcctacttcccccattccctggcagctttcacgtgagaaacttcttcagaaaattatttgcataagaattctcatctcaagctctaaacctatgcttagacagcatcagactctggaagggtgacacaacacttattttgaacagataattttgtgaaactcttattctatttgaatttgacaagctcagaataaatgacgtgagagtcaacaaacactgaattgatttctgtattcaaacctacctagcaacgatgcattaaatagcaacatactaagtataatgtgtattcattttctccatcatagtgcaagtaatgcattttgcttatactgagaatagtgaaaatagctacttggcttaaaaggaagcaagagtggcttttccttaacttaaaaaaaatagtttctgaatatttcagaggaaaatgcaaattgagaaaaatctctgctccttagatgagatgtgaaaaatattcttgataggaaggtggcagaaaatatttttaggcagatgagatgctgctagtttgataggtttctattagatataacgtaccaaactgtgtgcgtgtatacattttcacccactggtaaaaatgaaatcatgtaccttcatcttatgatattgtatgtaaatgtttcatgtgggttagagcatgcatgtttcagagctaagggccagaatggactaacatcctatcaagtgttacatctgatgaagatctgagtaaaaacacaacactaatctgttcagaacatcaggtgggcaaagataacattaacaaaataaaactctcgccttactgaatagacactgggtttgctctatgagaaaaacagatattaggctgaatggcttattttcacattatttgcagtttggattttggccctagcatactacagagcaaggaactaaaacatctaactttttaaaacgttaagaatatgagatactggaaagagatggattattttagttattcttaatctttcgtgcaacattaataaagttgtatctatatgacattaaatcttcatcagaaaaattaagtctgggagctgctcagatgttcaactgcctacgctgcatagactcctcaaattgcattatttattccagtttttcagttttaatttggttcttttgtttcagaaaccaagcttagaagaaaatgagcattttcttaagtccttcaaaaagaatctactatatttcttttcttttctgaggtagtagatatattattatttatttttattttaattttccaaccaaagatacctggtttataggcaataatatccctttaataggattcaaagtgtctgaggtttacatagaacaactttgtgggtttattcaaatggtcaggcttacaaggagtagatcgaccaatttcagagccttcttggagagaatgtacaactgataccagctttttaagatcagcatcaaaagcttatcttgggtgtgtgtgactgtttctgccgctgtccaggagatctaccagtcttacctttttaactaatgtaaaaccatttgtctcaggctgcttgacaggtggagctagtctgtaaaacttagctcatgtttttttcttttctctcccatgtttagatggatggtaagagagctgagctgcaagcagtattatgtgaataacacattttgttgcctatgtttaagaggctggttgttttgtaaaatgcctgttagttgttctctttgtttgattgttcgtttgtttttgagatggagtctcactttgtcgcccaggttggagtgcagtggcacgatctctgctcactgcaacctccacctccctggttcaagcaattctcctgcctcagcctcccgagtagctgggactacaggtgcgcaccaccacacctggctaatttttgtaattttttagtagagacggggtttcaccatattggccaggctggtcttgaactcctgaccccatgatctgcctgccttggcctgctaaagtgctgggattacaggcgtgagccactgctcctggccaaatgcctgttagttttatctgtgggattatgtaaccagaaaactaaagtggtatgatgtgatggctactgaactcatgagattcctggaaaacattctctcttgtaggaattcatctgcctataaattaattaaacatctcaagctagtccttctataatttttaataaaaattatactcagttctgggataacttgaattttctctcatttaagtaccgtcactaaaattgtacaactgtcaatctttctgtgtttagttaaaatgttccatgaaagtggagaaccaatttcactcatacagaaaagagaaggcacatgttccttggtcatatgtatacagaaccaggagaaaagaggaagtgaaaggacagggaaagaaggacagggaaagagacacagggaaatgatgaaagggagggaggaggttggagataaagactggagagaaaagaaaaggctaagagagtaaaagagatgaaaaaatgagaaaaaatgagaagaagtatagagaaataaaggaacatgatgcaggaaagaagagtaaagtcctttctaatacccacaggaggagtaaagaatgagagagaattagagacacttatgaaatactaaagccaacaaccaggtgtttccttgggagatttgcctaatgactctgcattgattttctggatgatgtcaagaggtaaacattacaaagaactgccaagacagtgagcggcaatcctcagccaagatctaaactcagcaatggtgcatgagaacctgatacccacaacagaatgcttctgcactgaatccatttcccaacttaaaatacagcatcttagactttcacattttgcttatctttcatcacttttcactgctatgcactgaaatcttccgctccctgcaaaaagctctgctctgagtataaacacaactaccttgatctcattttaaaatctgtaatcaaaatcctcttttataacattcattttgctctgaatccttcattccagctactcagagtacaatataccaaaggagagagcctgtatccaaaactttgaggaataattttgatagtggttaataagaggacaatgcaagtttcttccaatgttagtgctttaaagggtgttttcctttaggaggatttacatcctagttaaatcttcattccaggatggctgcaagcaaatatattccacacgtcccatctaaccactgctcatacagaatcaaagtacatcaaggttggaaggggattcacaggtcaagtcaaagctctcatctgatgcctcattgtgttctacaatttcaagtacccctcagtgcccatcagaactctttctgtgccacgggtctccatgaaacagaaggtcattcaattttcacatagcttgaattcttattttgaattgaagtctggccaaagttactttcaaacagcagagctagttctcccctatgtctgagcctgcacagaaaaggtacatttaaaatcagctgtaatgacttcttaaaatattttcctttccaatagatgcatagacagagaaaactgaatataaaacattttgatttttcattactttcttcctcttcttctgtactttactgtgtcaatgtgttttctattagttaaccttactgtcagcactaggggaactgatgctaacattccagatactgtcttctcagtgaagggtattgcatgacaatggcctcacttgtcatggatgtagaacctcaggtactgtgtaattagactgaattcatctcttggcatttcccctgtgctatttactcaactgagcatattattcattaacttcctgtactttttcacatgtagtgttcttacagaatatgttgctcggcctgaatctgtgacattttatgtaaatatagtttgagaggaaagttttatctttatgccttttgggtttggggtactagcgaggtggctctgaattcttcttctgtcttccatagagttgaaatcacttcacctctctctacatatgctatgaattctaatgcaaacattagtttctctgacaaagaaattcaactgggagttatgttttcttgctgaaaacaaaaacacctgtgatggtagctaacagcatgttcttctctgccagtcattggcttgataacttgcattattacctgcctactaagtgcattttttcatataattctctccaccaccaccctgcaaggaaggtagaatgatgatgctccttttacaaatgaggaaactgaagcttagagaagttaagccaaataaaccctttgtttagtaatcaaagataatcttggttcattttgaatcaaccagcaccttctcacatttatctacgatagtgctggctagacagtagcaatctaaaattcaaactcagttctcacatctggtcatccatggccatgtattctctcccaaatggaggtatacattgtcttgcttatcctgctttcctctaaccacaactttttaaagtgctcctcattttctggaaacttcaacttgtcctgggcttgattctctgtgaaaccattgacaaatgatttctcctctggtcctccttggctctaagccctttctcctgcatctctacatgccatttaacaatattatttctcataaaattccccgtgctgccacttcgatatctttagctcctgccagttcctttttcggtactatcgtttgtgattctatcaccataatcttatttttaagagcttcccaatccactagagccatcttccatgaagcaatgagatcacatcaattttaatcatgatattttaaaaatctgccttttgaagttttcatatccatgtctgacaatgcctagctttttttctttttttaaccttgctaccattatttctaagataacacacctactttttcctagagttactgtccactccacatcactaagcctttccttgttggttagaattaaataaccagacccctatcactttctcctggaaaggatataattgatatgtcaataaaggaatttgtctaaccacaaaatacagatgagtaagaattgcatccacttcttcagcagctcttaaagatctgctgtatcccacaaacatacataaaattatacataccattttcatatcagagtttcagtgtaaaaagacctttggtgcttaaagacagctattgagttttaaatgggtaaggatacttatccaggaaaatttaacatcagttatccaataaaaaccagcaccacggcaacacatttagatgacaaaattgatcgacctttttgttttctttccaccttctgcatatagagtaagatcatctgacatttaagatcctcctgcaagttacatttctttctatctcccttttcatgctagctcatatcctacctcttccataaagtcttgtttgacaaacccaacttctcactctattaaaacattaatgccaagatgattgatttgctaattaatcatttcttaatatctataccgctattatctcaaatagttatttaaatcagttactgccatttagcttctgtgtgtctatattttctccccaaatatatcgtaaattttttgaaggaacataaaagcctcaaacataagaggtttcagaacatagcaatgtggacatgccgtgaatggcaatgattaaattttgcaatcaggttcagaggaaaattttaaaatagagaagtgataagattttaaataccaaaccaattcacatttcttattttttcaacttattttaatagtcataaaaaacataactgaaaattagttttagtaacagattctgtggatagcaaagttcttttccccatgggccttctcacattccccccaccttggatcgtagcaacttttggtgaattccacctaaacgcatttcttggtaagcaagggtactcttggttccattcaaatcagtcagcgctgtcatggataaccccaaggatataaaatgaaaatatgaaagcatgtttatcataaggagctcttaatctaagggctaatatctatagtatatttgtcttactattccttacaaggaaagcgatattaatattacaggccaaggttcagatcctaaaataaatataagtaaggtgcttaagaagccaaataaagagagatttcacagttagctaaagagatcaagaggaatttaagagatagtattggagccacagaggttaaaagcaggggttcggactccttaggcaagtggggtgaagggtatattgtggccaaagcacagatcccaggaaaaggagagatgcattcactttgtttgttttgtttgtttgttttttaaagtttacactctcactgggaacaaaaggtatgtacgaagtataatgcaaatgtctgtggaaaggagatttggtgctgtattacaagggctgtgaatgccaggctgaagcatttatacctgatttataagcaattaagagttttattagctcgtatttatttcatgggaaatgtggaaacttccatgtagatacacctatagctttgtgttggatgtcttccgatcgtccatttggatccatctttaccttgcttaggggcttggaggctggcttgcatggactgattcaacaagctcctttggcttctgccttctttccataagaggggaggaaaggagtgcagtcagagccttgttccccagctccacccttaggggttgccctgagctggttgcttccctcactgaaggtcaggtgttcctctccatggttggttcatttggtctccaggttctggtcctcactccctctcctcaccccttccagacctggggtggttataaacggtccctctatgagggatcctcatgactcaacatgttccatgtctcttgctgagactctccctgatataatccccaggtatccagaaatcaaaaggaaattggcgacaacagtagttttagcctttgctgggcaaaatttcaaacaaaaaacctgaagatatggggaaaaatcagcttctttgagataaccaatgtaggtcttcagtctgctgatggccagcttcttctcttttttgcttctctctctttctctgtctctctttttaaagatggggtcttattatgttgctcaggctggtcttgaactcctggcttcaagtgatcctcttgctttaagccttctggggagctgggattgcaggtgcaagccactgcaccctgcttctttttacttcttatattcctgactgtgccattaggctaaggtcaattatttctacaacctatctccttctcagaggtttcaagatcttctaccctctgtatcaggaacaggttgtattccaaaaacttgtactggatgtctgtgaaagtctgccaattcattagggaaatgtaaatcaaaatcacagtgagagatcacttcacaaccattaggatggctatttcaaaataaataacaaaaaaaaaaaaacaacaagtttctgtgaggatatggaaagattggaatccttgtgtgttgctgatgagaatgtaaaatagtatagccactgtgtaaaaaagtgtgacaaacctcaaaaagttaaacatagatatgccccagtaattccactccttgccatacacccagaaaaactggaagcagggactcaaacagttcattgtataccaattttcattgcagccttattcacaataatcaaaagctggatgcaacccaaatgtctatcgacagaagaacagacaaacaaaatgtggtatatacatacaatggagtattattcagccttaaaaatgaattaaattttgatacatgctccaacatggatggaccttgaaaacattatgctcagtgaaataagccagacataaaaaagataaatattatgtaattctacttatatgaggtacctagagcaggcaaattcatagaaacagaacgtaggacagaggttaccaggggctgagggggatggaaaatggggagttcttgtttactgggtacagagtttcaagttgggatgataaaaaagttacaaaaatgcatagttgtgatgactgcacaatagcctgaatgtactcaatgtcactgaaccatccactttaaaatggttaaagaaaaaatggctgtcaaatattctgcagcagagaccaaacacaggacccatatgaagaactatcggtagttaagaactcctagaaatgacaagatgatactgagagtggagaggaacttagaccccacagcattggactggaagtgtcaggagctggcttccaaaggtgctctcacaaatctaagctgctatgaatctgtgattagattcatttttattgtttccctgttgtacaggaaaaaggctgtttctgactataattttacaaaaatgccaaaaagttttaaaaataatttgttgatttgtggttagtaaaccagtataatctttatgttcacatctattattttagattccttttggcactgcaacaaattaccccataattagtggctcaagtgaactcaaatttattatcttatatttggggagttagaaatctgaaatcagttttgctgggctaaaattaaagtgtcagtagggctgtattccttctggaagctccaaggaagaatctgtttctttgcgctttgcagcttccagaggcctccttggctcatggccctgtgtcactccgacctctgcttccatcctcacgtctctgttctgattcggactctcctgcttctgtcttttccttttaaggactctatggttacaaggggtttgcctggatagtccagggtaaccttccagttttaaaatcctatatttaatcatatcttcaagataccttctgctatgtaaagtgacacatttagaagtcctgtggattaagatgtggacatttttggaaggggacattattctgtctaccacatttatcaactccaaatatattttcaaatgaaatggaaagagaggttagaacatacgtatttttcagattaccaaattaatgcaagtctgttttagcaaatctagaaactttagaaaagaaaaaataaaacagtattatccttcatcccagtctcttttttagatcctaccttctatacttaacatatgataaggatttgtcgtgtcatcaactaccttttatacttagatcctacttcttatacttaacatatgatcctaccttttatacttaatatatgataattatgtttagatcctaccttttatacctaacatatgacagatcctactttttatacttaacatatgataagcaattgtcatgtccttaactactgaggtgtctattttattaaatgagttaaaagatgagaaaagatgacggaactgagttttggttaaaatgatagaatcggcaagtgggttttagtctcagttttaatatgttttttctccttttagatattttagatcagcagataggtttctatgtgccatatttccttcctgaaagctaaactcacgacctttcaatacccacctatatcaaatcctcaaagcaaatatctatattccaaaataattgattgaagttatccatattttactctgcggtaaccttctcatcctgtatttcattttcaaattaccaagaatctcacttatgtgactatacactaaaattaaaacacaaacacactgcgtacactcactttggtctgagcaaaaagacatgaaaggtgaacatttttgtgaaattttacaagttcaatggctaacaagggtctcaatctttaaaacagtcagtgaggcttaactcagtgtaaaacatcatttatatcataatcaaacttcttcatatatggaaactttaagcaacctgaaaccacaaagaattatctccccaacctcctctttttgattaagttaatttagtagctttaactagaatggattaattagctccaaacaatgtagcaattggatgttaaatttaacagggtcaaagggtggagattggttccaaggtaggagtcttatatctacatacaacccagccttaagggcgtgccatttgtaaaaatacaattacagatttaatattcattatgcaaaatgtttgggatcataagtgcttcaaattttactaattttggatacttgcatatatctaatgagatttattggggatgggatccaagtcgaaacaaaaaattcatgtatgtttcatatacattatgtcttatgtagatagcctgaaggtaattatatacaatattttaaataactttttgcatgaaacacagtttgaactgcattttgactgcaacctgtcacatgaggctaaaaggtgaaataaatctcatttttaaataaaaatgaatattttctattacactcaaggcacagtgcataggatgagaaggaataactattattccttgctattcttgtactgaggttgaattttagccttaaactatggtaaggaaagcccttgttccttcatttgagcccaatgtcaggtcaaatatgttaaaataaacatagtaacgcaagtcaggggcttccagagagctgcatcacagttttgtgcataagatacacttgaacaccagaaagaataatgcttgtggataaaaatgcgacacaaaacatgtagttactaggctgcatttcacgtactgacacccagcttggctcagacttcaaaatgtgacatcttgcccaaattcaacaaaacttcccagtcttacagggtgattttcaaatcgattaagttgggtatttctttaagggaaaacaaaaatcagagcagtgatttgaattctcactttcaaaacaagtttccaactcattaaacatcaccttcaaaatgtgatacaaacatgatttacctattgcctagcaaattaaggcatttcattaccaattagtttatcacgaccaactatattttattttctacctttcacaaatgcaaaaggaaccatcagacagttctcagctcttcaaaccactgacaacaaaaattgtgccagatataaatatttacatcatgaaaagtaaatgttgccaagattccaaactccaatgcatttgaaaattggtttggatcaggtatactttcctgaattggaaagatacaaaatcatctgttcaaaaaatatctctaaaacaaaaaaaaacccaagtcataacatgtgagtgatttttaacactagactatctcccaatctcttctttcccaataaattttagggagaagctgtgttgacatttttttctttcacatcaacatttttcctttaagacattctgatggaaagtaaaaattatatatccattgtttgtgttagtttgacacattttccatctcaatcccaatctgtactttatctaaaaccccttcaaatgcttgccataactcgtaggcgaaggattcagctcccgaacactgcctcaggacctgccctctgctgtcctctctagcctaccatcttgcaagcctctcttcgctccctgtgttcagccttgctggctacctttcagctgcattctggaactcaggcaccaaaccccattctgtatcttgggcttttccaccccctgcttttccttttgcctagaatgcaattatcccctacatcaccctctccaagaaagaaagaatgactgaatatttaatcataactacaacttttccttcttaaatactgaccagcgaactcacacgtgttcacgactttaaataaataattcacctttttaaagagaaatgtacttagaagccatgacaagctccttgcagaatttataaaaataaaactataaatggaacaataattaggatagcatcgttttatatggaatcagagcaataaactaaatgacctatatatgacctttccacaaaaatgcttctcaagtcatatttaaaacagtacacaaatactgcataactaaatggtgtcgaccacatgcaatgtcttttaaaacctgctttgtgacctgagtcaaagtcacttacagctttttgatgagtcattaggggtgtgtgtatctgtgacagttacatggtacaagaaaatatatttcaatacatcagaaggggaaaaagttaacttacaaacttcatggtatttatggtgaacagactgcacaaaggaagagagaacagagcccaatgacccaaaccctgaagaatcagccgctggtattatcaaaagttgtcaataattttaacctcaattttttgcacacaaattattttccatttctcttaacaatagctaaattacctttgaacacaattttctgcatgtgcattttttttttacctttaacaacctactcaacagtaaaagatagccaagtagacatgaaccagcaagagaagtgctaagattccagtgatgagaagacccaatgggcacttgtgcccttccacaaattaaagaggagctcgttatggggggaggagagtgaaggagggatttaggtgtgagaatcacaaagcccagctcagcatttctgtgcaggagctaggattcttagcaagcaagatgcccctaggaagattaattattgattttcttataaatcatctaaggtgatttttgtctgtttttttcctcccaagatgatgaacgtctgattttatttttgttaattggttttctcacttcactgaggttaaaagaaggcctagtaaagcagtttcttagaggaaagattttcccagcatgataggcaggggtggccactatgctttctgtcctttatgggggtaccaaggttgtctgataagacttcaggcaacctccaggaggtacagagtaatcagaagcacaaaagtttgactagttagggagaaaaagcacaatttagacatatttctatctaatggcggcaggtctgaagtctgtggtattcctaggtgggaggacaaactcatcacagagactgaagccttgaggattagctttcagaatcaagatggccccatcttcaactttaccatggaagcaatatggtggcttaccttcctgccccccgtgttgatgcgaagaggtgtcagaaaggggtcgaagatcatgtgactggtctctatgttgactggcgactgccgtttccccacagagcaaagattccaagctgagttcaccaatccccagaaagaaggaactagaaacaaaaagaaattatagaattaggctgagtagcaggttggggaaacaacataaataaacagagctatgtacaaacgtggtaaaatggaagagaaccaccaaatgttcccacccatggagatccttgggggttgctatggtattttcctggtctgaatcttggtccacttctctaagtcttacctgcatggtctcttgtcatcagattttcttgtttgaggcccactcatcctgcagtttctttgttgactgcagtcatcattaacactttaatgctaacatcattgttcaggtctcatcatctttgcaatatgcctggggtagcacaaatatttagcaattccctggagttgatgctgtgcttttcctatctggcaagaacgatgtgaaaatcaaccttatcctatttggaagtttttcaaggaaagtgtcattcagtgtacacaaagtttttctttgggttgtcaagactaaactgagggagtgacttattttatgagccccctaatcaatgccagacaagagcttagcaacttgacttcatctttgtttagttcaacactgtgtcattaacctaatgtacttgtagataaagaattggtgttcatttgataggcagaaaaatgacattaagagctgagcacaaatacccaaaggaaaccgtccactcattttcagtgtcacatgaaaacttctattagaatgtatttctgtggcaatttccagttcgatttctctctatttaagaaagttttcagggcaagggtggggagccaacctactaattttatatcagtgaagatcaaaactatactttcagcctttccctgcccctttcagtacttccatcgagtctctggatccatgtgtccttcagattcccctgagattatatggccattcattcatccacccatagtacatgcagtgaactcctatttggcatcacgcactgggttaggctgaatctcgaggaaggcaggtaagcacaagaacaactaacacactggggaggctcactagtgtgaggtcgagtatgttatgagactccggatgaggggaagccaatcctgccatggtagaggggaggcagggagtgactcctggagaagatgagcctaacaatcacattagccttcttaaatggacctgtcctctcagaaactcaagtttaattaaacttaaattgaataaaggctttaacttacagtagccatcattcttgcctatagcatagatggagaaaactaaggcaaaagaggagtttggagacacttgccaaagatactcaaattctttgactctcttatttgttataggcaactgtaacagacatgggaggagaactaaaaataagttccttggcctagacaaacacttcaacatcaaaataagatgggtctcattttaaaatatgacaaatatctaatttggtttcatccatgccaataagcctctggtagaccatttcctttagtttaaggagtttgaattggctttttagtcattaatgactttcaaaatggtagcaatggcctgagttacagagggagaaagaggaggaggaggaagaggagaaacattgacacatgtgcatgggcttcctcggccctctcatttcttatcatttcttaaaatatgttatcactacaagttactccacctttagaaggtaccacgtcctagcaagactacaatatttaagaaagttcttgcattatgaatgcacttatattataaatataaacttgtcttttctaaactacttttttttaaaaaaaacactgacttgatcttatatttatttatccctcaatcatctcaaattatgaaaataaagccttcattagggcatcctcctagcagtctttgtccgtaacgcacacacaagtggcaaatgtgagcatgccagggatatagtcatggcacctccacaagtgaactgagtggcccttggtaagtcatgtgtcccttggaccttcttcatggttcctgtggtaggccgaatggctctccaccaatgatgtttactatcctaatcctcagaacatgtgaatatgctatcttagatggtaaagggtattttgcagatgtaattaagttaatcgttttgggatggagagattatctaggattatctgggtgggcccaatgtaatcacagaagtctttataagagaaatgtaggagggtcagagatataaagatatacagatggaaacagaggtcagccaggagagaagataatactctgctggctttgaagatggaggaaggggacatgaaccaaggaatgcaggtggcctctagaagctggaagaggcaagacaatggattctccacctagagcttcctgctgtaaggaatataggcctgctgataccatgatgtttaaccccttgagaatatatttgacctccagaaacgtaggataataaatttctgctgttttaagccatgcagttgtgatcatttgttatggcagtaacggaaaagtaatacagcacccctttacctttaaaactctgtgagacaataacctctttgacaatgaagacatctatgatgcttgcagggctctccctagaaggcagctgcatgattaaagtagttacagctggtgcacattgcatttcatctactcccatgaaaagcattaacaaaaataattccaagcccataaatggattataagactgctattatgtggcaacatgggtgggcagctgctgctgtacttcactaataaacgtcatgcccaaaaagtacccccgcaaaaacacaaacaggaaaaactttatgcgaacatctgccttctcttttattgggcatggaattctttatgacgaacagtttcggggttttatatccccacttcacgatcaaagcctgcgtctctgatgctaatcacctgctcagccaatcgaggaagaagtgagaaacctctctcctgctcagctgtgtccctcattggctccagccctgaactgctatctaagtttatttacccctggatggctgattttaaatcagctatgaattaatagcttttcagaaatagaagccaccttagagatcgtctgacttaaattcattacatggatttaaggccatagaggcagggagtaaagtcctccactctaggtcacacagccaggtagaggcgaggaaggacagagtaaagaacattactcaagatttccagtgctactgagcctctgctgctctaaaccccttcctctccagcaggctctatacatgagcagatcattttaggaaatttcagttaattgctgccaagacccctgtaagacttttgctatcatttctcttttggtaaatcaagaataacattagtgccaattttccagttaaaataaatttcaagtgcaaaggtttgaatcaaactgctttgaaagtcaactattctaaataaacttaggattttaaaggagccatacaaccatggagtaacatacatagaagggcctgggtgtgaaaagacttcagttcaggcgatgtgtttgggtcccatctgcaggcctctgaggagacctgatggggatgattgcacacaaagagctgctccagggatagttcctggggtcagctgcaccgggcaaggttttagtgcagataaaaatgagaagtcagtgctgttaggagcggtgttaagtgttgggacaataattaagatattgaagctagtctagggaactcaagtgccgaatggaccagactaggtctgcaaatgtggtgtaatctagattctagggaaatggtttaggacgaaggctgtgaaaacaggcgtccatgaagtgcctgtgcctactggggcatgggagtcagatggcccactttacatgcagagcaaggatgggcgtatgaatgaaagcttcaagatttagagtgagaaacttgccctgtgggtttgtgcagaactgtcagttatatccaaggttctgatacttaactacccttcatctacccttcatagtgttatctttcaggtttatagacacccgtgtcaccttttggagcaaaagtgggttatataatgctgtggcaggcactgcctctatttccaaggtaagagaaatattgttgaatttttttctcttagtttccatggctatcctccaaaatcagatgtttaaacttttatttttaaagcatccattattatggcttattagctaatgctgtgtctttacttgatcaatacaacttactgttgagagaaaatgtaaataaagcaaaatagagtaagaatcactctaattaatggacaaccagtctgacgatgtttgaattccatcatccttggcatcctttttgtacaatcttctaatttacatataaactagaacacaaaacagacccaaatatttttgcaaattaattttcacacagcctaaaccatggaacttaactgctgcatcacagcgatgtgttatcttgccaaagtatttcccaatggcactactgccattcttaccataaattacaaatcccaaacgttctcttggctctgggtccagtgagttttgaaagatgctcagtgactctgtgatttcaactgcttaaatcatgagccttggcaaacccaaagcaaaacttatcagctgcttgttcagacccatgaaataaaaaagctccagctgtttaataacacaccttggcaacgtctggacaaaaacaacaaagttttcaccaaaaacaaataggtcagaagagcaaggaaccagaggaatcaagtccgataaggagagttaaaactggccttgacttctttgtcctagagaaggtgttccgaagttagattgtgcttttaggcatcttccttattcatttgtcctaagccagcagaatttgctgctgtgggcaggatattaggcacttggaataagtttatacagcttatgtgaatttgctaagtcctatggcaacaagataaattcaattcaaaagcatttactgacagcctctgatgtgccaggcattagggttggcactgaaagttgatgcaacaaatctttactgaggacctactatgtgtcaggcactgccatcagttctgggaagtcaattatgaatgagagatatggttcctattctcatgaatcttgcaggctagtgggaaatatgggagataaacaagtttctatatgtctatctgtgtaaagtttttggtaagcatgttgtagagacaagacggtaatggatcatagcttaaagcatgtatgggagagaaaacctaggtagcatggtcaagggtggtctctctggaagggtcagctggtagactctggaaggactgggaaagttgcttctaaacagtggcaggagaaaggatgtccaaggcagagcgaaagtgagcagtcttggcagagaagagctggatgtgttcaggaacagagaggaagtcagtcgacttgagcctgatggaccagatgaggagaagagcgaaatgagatgggggctggctgggtagaccaggaacagatggctcagtgctctgcaggccacactaaggagtttgcattttactccaagttaatagaaagccactgagagtttagcagggaaataccatggtctgattttttaattaaaggcaggtatctgcctcagatggaacacagccaagagcaagctcgactatccttgaagtagtttgaatgggaaaagaattggttcccaagcaacagttggggacataggtttttaagtgaatttaatcctattgcttttggtgtgtttaaattctatttcaaaggcagaactaattgaatgttttaaaattattctcttcaaaatatgtgccaataaaatcgtgttttcctaggaactagtgctttacaagccattctttgaagcaaggaatattttcatgaagacactcagctaaagcaatcttttctcgttttcaagcaataaactaagtcccctactttttggtcaagggaaagcaaatgaaagttgggaaaatgaacgctggcataaaacatatctctagtgaattcaatcctacagataaagccttccacttcaatatagcaatctctactttggggttataaagcatatgaatacattttaaataagaactcatatctttcccttgctcttttcctcaccaatcctgatttactgtctcttcctctcttctcaactgtaataaatctccactttgagccattattaatgagcaagtttaaaatacccactgctgcaggcttttggtctgtttctgatttgatttatttcatagatggaattggccttaaagttaacccctttgctgatgatttcttcctccattgcagggcctctgactcatagcacatggagggtctttaactagggctgcccattgttaaaggtaagttctcccattgagaactagggctgtcacttgggaacctctaaggaattgcatatatcctatttaacccataatcattaatttgtgcattcatctaaaaaattaatggactgtatctgatgaaccagggatagaaagataaatcaaaatgctcccactcttcaggacactcagtatggtgggaagatagacaagctaacaaatagttataacaaaatatgatagatgttataataagggtatgtgtatattaaggcttaaattaattcagagcaagaagcaagctgacctggcccttttctcaagtgctaaggtaagccttactcatagagagtgcattattttaatcctattgctttaggtgtgtttttagtcttgtaactagttaaaacattgaatcatctcctcaaacagagatatactagtcctaacaactaagatggattatcaccggaatgccaactattatacagggaaaatttaagccactgcatcttccatcttctcacttctccaatatttctcccatacagctattattccatggggaaaagatcattagtaccatgtccttaccacagaaccatcagaaggtggctaaattactaggtggcttcatttctctagctgtaaaaatgggggtgacagctacttcacagagctgttgggaagattgtgagaatgtatttataaatggtctagcataatgttggctctataataaggatttaaaacattggagaaggggttgagtgaggagggggaacagcatgaaccacagtgtgattccaacactgtagcattctcagggcagaaacagtcgagggtgaaggatccaggcagaagggtacagggaggcaactttcagatgcccacccaacccagcctggtttcagaacagggcactctgatgggagtctaggtcaagggattaattgcttaattccatactttcaatgagccatgtgcatttatttcttggatccataggtctcaatgtctggataaatgaaggcagtgagcagtgatatgggtcatccaatagggtttttaactccaaagaaaaatcattttaatgtagcttttgggagttgtcagattacttatttgtgcagcagcagcttcgtccttcttcctgtttgtacttggttccaagtggtgactggctggatccccaaaagcacatcactaaaggtaaagagaaaggaggaagagggaattctcttttgctgatcaccccctgtttaacaagctctgtgctaggaacttgacacatcttatcttgctcaatcctcctcattattattattttacaggtgaggaaaataatactcaaagaggttaaatgactttctaaggtcacctggccagtaggttagggaactagaatttgagatcagtttctttctttaaaacaaacaaagaaaaaaaccaaaggaagtaatgtatgtatggtaacaggtcaaatgatccacaggtgtataaagcaagaggtaatcatctcttcctccttccagtaacatcctgaggaaaccagtgtgaaagtgtattaggcatcattcaacatctttcagtatactcctacaaacatacatacaaatatatacacatgtatatatatatttgagaggttcttttctaaaaaagaagtatttttataaaaagtaacattatgccatggatgtccctccatgtccatactaatagagcttctctttcttgtgtaaagctacagaacttctacagtttgaatgcacttcacttttctcaatcattccctagatgaaagacattacagttatttccatcttactttaccatgaaaatcaatgctgcaataaatagcctcagagatattctttttcatactggtgctttcatttcagtagaaaagattcctaaaggtagtattgttcagtcaaggtaggcacatgctttattttaatagatgctgtcaaattagtttcaaagatactggtagtgactatgatgaacatttactctcctatcggcaatgtgtgatgcatccatttccccaaaatctccatagtattggatgttatttattatttatttttagcaatctacaggaagaaatggtatctcactgattgaatttgcattttctagctactagaaatatttctagtatattctcatatgctcattgattatttgcatttctcttctgatcgtattcttcacatatttttctctgggttatttatgtttttcatttcaacttcagctgtcatgtgaattatggagatattaaccttttgtgacatggtataaatattttcttatagcctcttatctagcttttaaaccttgtttttgatattttgctatataaggattttaccattttgtatggttggatttgttgataattttctttataaggtttctgggttttctctctcatttaagatggcctttccaactacaggttatatacgtgtttttcttacatttttataaaatatttttattgttatactttttacaacttgattatttaaaaatataccagtgattaatatttgtatatgctatgagacaggggtctaatattttttccctgataaaaagtgaataatgccagcattatttattaaacaaaccatctttcaccatcaaactgaacgcccctttgatcacagattaagtttccatatgtattggatttgcttctggtctttctagattgtttcacctatttgtgtattcttgtgtaagtgtcatactgttttgagtgtagtaacatttatggtaatttatacgacaaaacttccttcctgatcaaaaagatgctgctcttcccctgctaccactacgggaccgtaaacacccaagctccacggaaatctggagttaggactagtgatcctaggaacccttaagctgttggaccattcttgggggcacaagactgtcagaggttatctggctcctcctcatgtcttcaggtagttaggtacttcagtcatacttgatagaggacagtgtctgcccctttcctcaaaaagccctcaaggggaaatttgctcttttaatcaccttggaagtagactttattatcgccctgattctcaccagtcttaatggaatctgagacatagagacgtcaaactaacttgttcaagataaacaaaaaaaaaaaaaacaccctggcaagtggtgaggtcaaaattcaaaactcaggttgttctggctccagattccttgtgttcttataactcctgtgctatacttcctccctaacctggtgccctgacttaagccaaacatgttttcttctgagcctcagtctcctcctttgtaaaatcagggtcataagaggacacactttgctgaatatctttgtccaccaaagtgatagtgaaaaatcaaaacaataaaattagcaatgatcatcatagccaattctttttattcaccaagtcatggagtatgccattggtgggaaatcagaaagaaggtagatttacatcaaattctacataattgcagtccccaaagatgggtactagttttcccattttacagataggaaactgaggctcaaagagttgagtaatttatccaaggttattcagccagtgcacagctgagctggtgatttgaacccaggtctaaaattcccactcttattctgctctcattcatccctcagacctagcacagaattaagatgaattaagctgccattatggtttcctcctcaatattttgctttctgagaattaagcctcctgaatcaggtgactcattcttgcgagaatccacaggaaggcataaaagacagtctggttgacgtaggcattaagctcttgtgtgcctgtatcaggtttaagatttagtctaacagttgtattaagcattatcaggttacatttggctagcaatttttcttgccccatgtaattacaggtgcttcagataaaatctgaaattagttgatagaaactgggaattaaaaccacaaagagaggaatgtctcaatgcatgtcaataaaccagcccattaattatttctacctactcaactctgaagaaaacgaccaggctgatgcctctggataatcacatgacctacttgatgtttatacaaaagctgaatcttcttggctttcagaagcaaataccagtaatgttgaaaccagcagggacacaagaattaaatgccagaaaaaaataatatgaccactgaaaataggtgatcttcttcagcctttgtaaattctgaaagttcaccaaaacagtatcaggtgatgatttcccacaaattcaaacatctggtgaagcacttctaaaatcctgcaaaacatctggatatcatggaatacatatgtatgtatgtatatgtttagtatgtaaacatctcactgtccctctatccctttaacactcactctctctgtacgtacatgcaaaattatacccttacacacatggcaaaagtaggtgaataatgaagggtacagtagaattgcaaaccctaccacatattaataactgtatatggagatcagttgaacttagccttacagcccattgcagcagtggatacctcagtttttgcaatttctcattgtcttcacatttgtgtaattctatagaaacctccagctgttccagtctgtcttgaggtttatgtgtatgtagggtattttctttattatttacacaaataacagggcttagttatcttcatgagacatcaggagaaataatcttcatgctgccactgagtcttggaacccaaacacaacacaactggtcaccaaagatggaacgaaaccacatatataatccgttggtgttttaatgattttgcactaggattcattgtccaataaatgtgcaatgtattttttatcgaggtgctagattttgcttctatgatatagtgtcttgaccaacacatttcacttgtcctcttaactttcctgttagacttttgtataattacacttcctattagccaggaaggaaatcttgcaggcattatatatatatatatatctgtcatctcccaaatcttaccatgatcaaatctgggtgatagctttgaatgctttgaatattgaacctagctactagtagcctaatgcaggttcccactgccaggtgccttagtttttactacagtatcttactaaagttcccttttacaaatgacatgagagcttggcagacaaggaagaaccaggactaaaaattgggctaggtccatggtccacaacagaatttagtgcacagcaatgtaaggatgatgttactctagacctgtgttcccttgcagccctggagttctgatttgatgctaccaccatgttgccagtttccattccaatacttgacacaatgtagatactcaacaactacttattgagtgggtggatggatgcatggatggatgcatgagagagggcaggaccaagtgtctgctttgcataccattttctctcccgtccttgtcatactatgatcttacaatataatttgtagaatgagtggagaattattctacttcatttcaatacccccaataacacaatatgctcatgcttacttttgtgcttttgctttaattattctttccactttctacaccccatagtcaaattctatacctcttagcacccctaatttaaatactaatccctccattaagtcatcctttactattgaaatcatcactctggatttctagagaagctggttaggtgctagaggattcctacttaattatgcatggctatattgttcattgtcttaaaaatgcatttcctaaatagatgcaagttcttcaagatcaggaactctgatatggcacaagacctaattacagggcctgggcctataaaaggtgactgaccaaaagtaaatatctctaaagggtttttaaagaaaatctcttgtattcaaaatgactctagcaggaaaatagatttagtgaatttctggcactcctcaacaccttgtacccaaatgtatgcccagcctttcggggctcctggcagttccaccaacaagcctttgcctgcagtggctgcactgcctggagcatccttccttactttcctatgcatggagtgcttgttgcaagcatgatctgggactcaaaccagagactctgattaaataagtctatggcgggatccagagatttgcattatttaacaagcagcccagctacttcccatgcaattgtccataggtcatgataataggagaaaccagctgatgaaattaacatttattggaagaaagcaggtttttctcagctttacaaggtcagcaacatgaccttaacaatgacaggcctaaagggaaaaacacatcgactaaagggtcaataagaaagtatggaacagagaaacaaacattcaaatgttgcctcctgccctgccccttgagagagttacagaacagtatctcctggtggggttagtaaaatttcactgggacccaccattgctctcaattttctccaccttttgttctaattcttcgtccaccaaacaacctttggatagaggttaccaagtgttctaatcccaagaaagaaaaagaatgtcttagatggcagacatgaatagttctgttatagaaaggggatttcccaattcccacattttaaaatgaacggtcataatggcttattcaccatcctgtgctattttaatgatcaccagtcaggcctaaggtccaaatcagtgaatataccaggactatcctgtttctggaattaagaatatgtttatcagacatggggccatgaagttttaaccggtatgtggcctccaacaggcactgccagcaaccagaccctgcccctcaatggcctacctctgcaggctaccctcaccttatgggaagagagtctgcaacttatcatcacgtaagaaacaataagctgcatttaaaaaccaaaaatgatttgtgcacaaagacattaacaagaacataatttatcataatgaaacactgaaaacaatctaaatgtgcaacaataataggggaacggtttagtaaattaggtatactcacataaagaatattggtgccatcattaacataaattttaacaatacagcaaatttttatatatagtctcaaatatataaaacaatgtgcactggagggacaaaaaaataaccaaaatgtggatagatgttatctctggatagtgaaattacaggtgaatattaacatacatgtatattccaagctatttacaatgaggaggtagtactttcagagttaaaacatttgaaaaataagactgcttatttgggccagattttaacactacagagaattatattctgttaaactgattaattttcttatcacatctcttttcattagcaaggaaatgataaagagactctacttctctgcacccactttccgaatttctgggtcaactgggatgatccgggtagacccaggaataacatgcaggtggtacaccctccccttgtaggaaaggagagaaagggcagtcacacttagcagttgtcagaaagaagacctgggagacttctctatatcaagcaagaattcctccttttcatccctgcccttggacaagagaagctaatagggatttagttaattggctggttttcatcctaattggctgatgaatccattccaatctcaagaaaaattgcagaggaagaaacaaatgagggctcagctgccaattgatgttttagagacggcattttatgtgtcatgaggtctgaggtcctggagctcagagtattagctttccgggagactggggctccatcaagggtggggtaaatatccttgctgggagaccacaggctttcctgtctcattgaagaaaaaccgaaaacgatggcacacattcgattttgtcatctaatgctaaattcagattaaatcaacacggactcgttctggggtagggacagaaaactccagggggctgaggctcttgcattatgtgggccttctgaaggtgccaggtaagccgatgtcagctgagtttgctcctacttttcccacatcagtcagttctaccacttaacagggggattagtaatctcatttcttgggactgtcatcaaagtatcagaataaaaccacttagtagagctagccttctgcaaaatgttgaggtgggctaaattggtcttccacaccttgtcacctgccttttaagcctccttcccctcgactcccttatcaggtaggctatttccatttctcactccctttcagtctagctctcctgctccccatgcaagattacacctctcacagtcacacagtctgaactgctcattggtacttacgatcagatataaacaaaaacacacttaggaaaggtgggaatgatgatagaaatttgtgctagctaagaaattcaggccagatgagggctatgaccaaaccatcctaaaaagatcacaggaaatcttgtcatttgggacaacatggatgaacctggggggcggcttattaactaagccaggccccgaaaacaaatactgcattatctcacttacacgtggattctaaaatagttgaactcacagaagcagagaacagaatggtagttaccagggctgggacaagaggagcaattggggagatgttagtcaaaggatataaaatttcagttaagtggaataagttccagaaatctattttattaacatggtaattacagttaaaaacaatgcattgtctacttggaaagtgctaagaacagattttaagtgttttcaccacaaaaaaataagtgtgtgaggtaagacgtatgttaattaacttgatttagtttaactacttcaatctactgatcagatgcttgtagtatctctggggattaagaacactcaatggctcctcattgccactggtgcactgaacctcctttagtctggctttgactgccctttgctgtctggcagcaatccatcccgtgggacctgttttctgtggctcctcatcttggcctctggctggatgagagtctgacatttccagtgtgtcctggtgctttcctttctccatcacaccatgtccctcacctggcatgcctactcattcaaatcttactcattttccaaggctggactcaagtattgcttcctttgaggattttcctcaatgctccttacattaagtgatactttcttcttcctctaaaattctgttttatccaatgtctctgccatttgtaacatgtcttataacaatagcagaaagcatgtttttgcgtcttaataatccttgtagcttatagtatgataatgaaatatacgttgtttgatgaatgaatgaggagtgaatttttaaggtatcctgggcataaattctgagtgaatgctaccacaccacacagctggacctttctcttattcttgtttacttgctctggctctcatatattcgcacatttctgtcagcacaattagggtatctaaattgaaaaataaaatattgataagcagagagaaaaacagtaaaaacaaaaatatgatgaatgcttccattgtctcagaaatgacagacctttttctacttggcctttataatgtaattatttaagtatttctgtatgtagaatccaccttgctctttagaggccctcaggcactttttacaatgcaacatcttgattttggaatgcatcttcatgtgcaaaaaaaaaaaaaaaaaaaaaaagccaaaaaccttgtctagactttgagtcacctttatttgtgtactgtaaaagaccggtaggagcagcccaaatggctacagtgaatgggagagcctcataaaatccgacaaaggttcacatacctgaggtttgtaaacacagcatatgttcttgtcagtgtagatgtgaccttgccggtctctttgcagactatattagtgctgtgcaaatatttctactcaattgtaaaggcacattatactcagggaaattattctcccagcaaacagacagatgtttagcttcactttaatatgacactataatctgaattcttaatgtgagacagaggtcctgttggagctagggtgaaactacacatgcaaagttttaacaatgcagcactttgtagcatagattaagtcactacctctttctgactaaaactttctgctctttctttcaagcccctcttgtagcaccatgtgcaggggccatggtgcacttagcacaccttgacaatcctgagatgatgcaggaggtggctgtgaggatatttatcagtctctctgagcactatcaaacacttctgcttgcaaagccctatagaataacatggagcaacatatgtccagttgtgaggttcccctcttaggagaatatgaaacatgcctatcctagagatatcagcaaggctcaaaaaattcaaggaaaaagaaaaagtagctggggatagaccaaacccacatatctagattcattcttgggggctttggcattcaacaaacagatccatcttcaacttgctagttgttgtcaaggttaattatcctttaggacttcaagtaaaggaggccaaggaaactgagctcaactcaagtttagacacagtgaaatttcttttactgctgggactcagcaacaagactgccacccctgtgaggttctctccattttcaatccacttttctacactccgcctgtattgctggggcaggggctcaataagccatatttctgctttgtcagctcattcctgcaggctctgcccataggaaatctagagagacactggaaggctggagctcttcctgtttgcctcctgttccggttggcattattccagcgatgggtcattgccctggcacttggttccactcttcagatttaccctcccatattcctagaacaagactcatcataaccccttggacacaccaacaccaaccagctgcaacgctccccagaggactgggttccagttctgcaagggcctcctccaagctccagagtcctcaacagcaggtggagaaagccctgctatgagtctccagttctgtgctctccgatgctcagcttctaaattcttttcccagtcccttctccttattctgccgtccctgaagtggtagttggttccttttattatgacttttttgtggtgcaccagggtcttttatgtgtgtgcctttccagccctctaatatccaattaaacaattattttatatgaaattatcacagttgagataattgcatggtttctattttcttcactgggccctaattgacataacttattacttgtaacagagttacacagatgtttgctaaattgctgatattatatatttttgaaggtatatttacatgctaaaaatgtatgattaatctgcatctattaaaaagaacatgatagatcactattactgtccagaaagatgtccataatatattgagtgataacagcagtgattttttattagtaagcatttgtttcatatataagaaaaataaataaaattatgaagaagttaaaaataacggatactatgatctctatgagaatactttgttattcctatttaaataactttgagaatatctttagcataagtaattggggcagcaggatttttcttctgcccaatatttagttgggattgcaataactatcaaacaattaagatgcaatttatgtctttgtcacaatttgaaacccaaaacatttatataatatgtgtaattcaaaggcacacatgctactgcatctaaaatttaactttttaactaaatataactaaaaccaactcacagaaaagtctacagctgggaagaagaattagtaaaaactttaattgtggtctcatttacacttctattttcaaactcattcatgaattaattttaactctgtgcctctgccttcaatcaagccataagtacctgtcagaaaatgacagtgtttgaatatctgcacatatgttggaaatttctacactttgattcctttgtcaaaatttccacttagagctgtgtgggtgaggctctaaggcacaggcaaggaggttagtctctcactgtggccaagattccacgccaaagaatgttcatttagcgtgtaagccaacgcagaactccttattaagacagttggccctcagagtcttataaagcaggaggggagtatgatgtatggaagcaaatgttgagcaggaactacagaaggttagccttaagggtgatgttccatagaggaaccttgggctaatcttaatctgtgaagatggacattggactatagagctttgtggcccctgtgcagcctgccattatacaagatcacttaactacaatgtcttaaagcaactcagtctaaggcagtagttgcaaaaattttggatagtatatccctgttggggaaaaaaatttgcgtgcaatgccaccatgtgaatatttattcataaattacatatggatgctgttatactaattattagtacaattaggaacaattagtattgggtaccctccaagacactgaatatcagccagcaccctctcattcagttgtagtcacactgaccttcttactgatcattagccttgctaaacatgccctgtctcaccatccctgcactggatgcctctctgtccactagccacttggttcatattctcacctacttcagggctgctcaaaggtcaatctcagaagggcttctctgacttcctgtgttacctctgaccctctgtctcctctttactctagaacacttgtgctgggttcctctgtttaccttgcagacactgctttccccttctctgtccttttctgtgccctgggaggctgatttgcatggattacattcaactgggctcccctgaattatggcttctctttgggtttggccaataggaggcactcgcagggaactggagggtgagaagagagatgcctggacgtttattccatcagcaaccacccttgcagggctatggatgggaaatggctgttttcctctcccaaggtcacacctcctattgggtgtccttctcctaccaccaatcactgcttcctcttcatttgggccaccgcttcttgccctggaggagatagttccctattattagaaggccctagacgacttcaccattccttgttagtttctcttaaactctgcctagctttctataaatagcttttcgtgcactctcctcagacatttactttgagcatgccatctgtttcttcccaagaccctgaatgatacagcacttatcaccaataaatatagcatatatttatattgatagtctgattcctcccatttgaatggaaaatagccgagcgcagagatttttcacctgttgttgttttctgctatgtgcttagctcctaggatagtgcacagcatttagtaggcacccaggtacctgccaaatacatagatgaataatattttcctcctaggtcccaatggattgtcttgcacattccattttggaaatcaccaacttaaggaacaaatatatattattcttcaccaggttttactaagtgttggactaacctagcttaattcctacataatacatatccctgattattttcaaagcacatgaaatgtaatgtagcaggaaactctcctgaaagttctcaggttcctcctccaagattctcataatgaaagctccaacagatattgagccaatcatgagaaggaccttattagttcaccttttcaagttgtctttaacagattttctttctccctcctgatttccgttttaagaacatttcttcttttctttcaataaggaccataaaaactgcccaaggaagcaaagccttggctcactcactttgtccctacttgcaacaggagaaaaatcatcaaaatcctgttccccggctcagttacttaatttgcatatgatgctccattacttaattatcttataactcttagggcttagttgcccaaatcagacttaacaatcatctttggtaacaacatcccttacagcaaagagctaactcaaaagaaaatgattttttaaaaaaatgacaaacacatacaaatacctttttgtcctccatgcaaaaatttgggtgatggattctttatgaattgctctatgcctattaaacatgcccattactttactattggaaaaaccagattatttttcacatgcctgagtttcctttctttgtactaatcaataactgcagatgtactctaagagttgctaccatactgaacaaaatctgatcttcaagacaacctcgtggaacctgctgaggttgccttgggagggagaacctaagtggtgagaaactgctgaatcctgtatccaggaggaaacattctgtacacacaataacttctatgtgcatgtggctacaatttttaatgctgtgctcatctctggctatatatagtggcatgagtaagagttttctcgtgtggttttgagtttcttgagctgtaaatcaaaacattgtgatgttcaaacagtctttgggaagaagagaaaattaactgccaaaattattaaaatggaactctactttctattagaaccagaatagaacagcttgcatgaataggtaagtgcaaagtaagatataattttctttcacttgaatggcgtttgtatttccctctgccagcagtggtatgactctccaatgttgtattactttgctaaagctgctataacaagtatcacacactgggtggtgaaacaacagaactttactgtctcacagttctggagagagttctcatttaacttgaataattatatttgcaacaaccctttttccaagtgaggttatattctgaggtaccgggggttaggactgcaacttgtacatttgggaaaggggatgtaactgcacactggctcatgctcagctatttgagaggctgaggtgggaagatcacttgagcccaggagttcaagcgttcaaggctgcaataagccagtatcatgccactgcattccagcctgggtgacagagagggaccctgtctcaaaaaaaaaaaattaaaactaaaagaagatcaataaatttgggggagcacaatttaaccacaacaaatggtaaaaataaaaaatgttaggtcttaagaaaatactaagaaacacttggtccagctcttttgttttttagtgataaatagaaagggaaaatgtcttatccagggttacctgtcagcaatagcaacatagactcagagcacgaggcacaaggctctgctctggtgctttccaaagcacacactgcctttatttcattcttcccaaagctgagactcacatgcatttgtggaggggaagtagcagcagtgactcatcctatatgaaaacccatccagagacttatgtgacatatctacagcaacttgctttgtggaggtcattcaaaataggagaattaaaaaaggactaggctggtcttgaactcctggcctcaagagatactcctgcctcagtctcctaaagtattagaattataggtgtgagtcactgcatgcagcctagattcaaagtcttatacaaactttcctcgtttaaatcactgtgtggtttgtctcctgattggactcagactgatgcagtctgttctagtaccagtttgtttttacattgaaatatttgctccatcaggagtttatcttggtataagctgtgagtatggatctagctttatttttcacagatggctatctggttgatccaaacatttattgaaaaacttttttcctaactcattttaaataccatctttattatatactcaattcccacatgtatttgggtttattccagactttaaattgtattccattacactctgtcttttccatctccactaccacattgtttgaatatctgtttaatatctgataggaatagtccctggatatttttgttttttttttttaatttgaactttgttatcagaatgtctagatttcctgctggaaattttattgggaattgcaatacgtttgtagattagggatatttgacatctgagtcttctcaagaactagccactttttattagttcaagtctcttttggtgtttctcaacagtattaaacattttttaattcacaaaaggagcactgtgtatatttatagtgtacaatatatttgatataaatataccaatagcattttaattcatataaatcttgcatattattacttttattcctaaatatttgatcattttggttattgtgatggcatcttttcttccattataactttttaacttgttgctcttagatatataaagggtacaaatatcaaacataaaaagggaaagcaaggtttcaaaactgaattacaaaacttcagtgccagacactgtacctggcaattgctcagtgctccaagaaagttaaaccaacaaataaaaccaattttaatagtgataagtattactctgttgtgattagagcttccaccataaagtattttcaagtccattatcatttgttttctgcaaactctgagagacaaacattattctcatttgacagaaaggaaaactgaggttcaaagataaatgactttttaaactaaagtgttacaatttgacagaaaggaaaactgaggttcaaagataagtgactttttaaactaaagtgttacaagccagtttgacaaagcttgtatgctattataatttcagattcaaattccaatgctccctctcctaaatttttattgttttgaggaaaattaaactaaacattaaaaaagttcatttacttccatttttatgcctcccttgaaatgcaaatttagcacaagccaaccatctctctctaagcatttccaagcacttgaggcatccacttctttgcactcagcagatggtcataaaatatgaacaaatgaagacagttcatctttagactctagggagtcacggagtcacataagcttaggatttgaatgggcttagaggatttctaaataatgctctctggtttataaataaaaaagctaaggcactacgtcctagagctagtaaaaaaaaccagatatcctcactcccaaaccagtgttctgatgcttgtaaaatctggcactggtttaatcagagagtgaccagctggaataaagtcctgatcagattgcttttattctgctttctctgaagccaagaaaggtcatcaaagatgcacaggagagactgcaaatgagtacaatactgtgcaacagtgatattcagaattattaaattggaagccctggtgccctttgcaggcacaaagcagctcctctgtaaggaaatgaaaagaggttgcgtgtcgagggatgaggcttctttctatagagaccccattacagctccagaggaaagaacatcagttccttccagggagtctgtgtaacagataatgtatgcttcttttcaggctgtcaagattcacaaaagagataggaagtttgaggctctattactggtgaccttcccacagaatacactgcatctcatttttaaaaatagcccggctcttgggtggagtatttgatggccttcataaaggaactgaaaactttgggagaagtactgaaaggaatagagtgaaaaagagaaagaagaaagcaagaggcaaaaaagaagagaaaaactggtttcctactgctccttcatctttctgcatctcgaagtggtcacctttttttatctcagagcctcattacctctgagaggtttcctgatggcctcaactcatctctaccatccttcagaatgctaaacaggttggactttgtcaccacccatagaaaccttggttatttccacattgtaaagtccgcattccttagcatagcaagccaggtgctttttggaaattcagcttccactccagcttcattttctgctccacttctccaggtaactcatgctttggccaccgtggcaacttgccactcctcaaacatgccactggctgcccactctcttgggcatgcttttacttttttcccctttctttcatcaatcaatattctccctaagaatcaagactcagatcagaggctcctgtttctgagaaaccttccagccaaaatgaatcactcccccacctaagctttttctctggtctcaaagccttctactctaagctctggttcttttgattagacctaaagacaaagccatttgtaaaccaataacagatctgataactttttggttctcacttataagtgggagttgaacaatgagaacacatggacagagggaggggaacctcacacaccggggcctatcagggggtagggggaaaggggagggagagcattaggacaaatacctaatgcatgcggggcttaaaacctagatgacggattgacggatgcagcaaaccaccatggcacgtgtatacctatgtaacaaacctgcacattctgcacatgtgtcccagaacttaaaataacaaaaaatctggactaattttagatttccaaaaatgttgcagagatagtatagacagttccccacctaataatttttagaagaaatattttatagaaaagcataaagaatgatattaaaaacacatgtatactcattttccatctttatcaaatctcaacattctgccatttgattcagatttttttttaaagatataaaacaatacttggttctccatgtaagtctccttgattctaaggagacttgattctaattcttcctactcagaattaagcactctcctgatttggcatttatggttaattggcctgcttttatatattcactacacatgtatgtatcccagaagttatatttgattgccttgtatgttgttgtacacatatgacctcattctatatatagatcagctgtacatattttgattttcactcaacaatacatttgtgatttttgcagatgtagttcacttattgaatgttctatatagtattttattgtgtggatacacaaaaataattgtcttcaacagatagaaattttagcttctcatttgttttttaatgtagagtaagagaaacatacaacagtgcacattgcagcactgcttgtattagcaaaaacaggaagtggatctggattgatccattaactatgaatcttacccatccttaaacatcatttaagcccttagggtagaaaagaaattatggggaaatcaaaatgatacatttggcagtggtgagaggcttcctgttccttttggttcagcaaaaaactttttattctttagacctacaaaaaagcagaggctttttttttgacccacacccaaagcagagggaaatcagtcagcatttttaagggaactacacatgctacaggggccctttagcgtctgccaagctcttcccagtctcaagaatggaggtaggagatgctgttcatgctattatacagaatggcagaattaagtccaaatggcacctggagtcttacctctttatatcctagttttctgtattcagtactggcccagattgcttttattttctgttgaaataataaactcttttacaaaaaatatgattgtttttcctcagttttaaaatatgcctataaatattctacaggaatagagggtaatagatgagctcaagtattttgcgagttaattaaagtagaacttggatttatttcgtaacgattttatacaaattgaaaggaaagtaagaaacgttattccaaggtgttcaaggcaggccttgtaccatctcacttcccactggttctactgaaacatttacatttatcactttttttccttctgtttattatgagagtatctaatttcataggcatggtggtagaacattggggtgaataagatgatgtctgctcttaagaagttacttgctactccctgaatatatgaaaactttttttttttttgtaaagagagagtgatggtatggttcactaaggaaggcaggagattgagtagttctggagagtcacataggaagcatgttccacatagagggtggatgcaagtgaaggccaagttgtaaccatctatcactgcctccaaggagcacctgcaatagcacatctacttggagtccaagtcctggttttcatagtttggccaattccatcactgcccaaaccatgaagtaagaaaaataatacaacttagttcaagagaataaaaacaaaatggagtgtgccacacaccagctatattcaactattttctgctctcctagagtgccatgcatttgcaagcctccaagcctttgcagatactcctgctttgaatgacattccctgtattctgtacttatccactgtgtaatgcaaccttaaagctaattttaagcattgtctttctaggaaacctttctcactccccccgagaggggtgaatcatccctcccttgtgtatattcccagagaaggctgtttctgcctctgtaaaatacagcactcagcacagtctgacaaatagtctcgtaaattgtgcatgcctctgtgtcctttactcttagaaggcagggactcatctaattcatctttgtcgtgccttcaatctgtggcacagtgctaacatatagtaagtgttcaatgtgaagttcattaaatgacgtatgtagctgcaaagaaaaaaacacgtagcattaggaattagagtagtcaacagatagtggtagtagaattgcctcaaattccatgtaagtatgattctactgaaaataactgagttttttttttttttttgataattggcattaattcccttggctctaccaagagatcttaggttcaattccctgggcaagcaagcaaattgtgtatgtttgagtgggtaagtgaggctattccacatgaatctcatttagaaattatgttcaaagcaggccatttgctactggattcattacctttcctagatagcacagggtgaaatgtttgcttttattaaagtaaataaatagctcataattgtgcctaggaagggaaacttaaaggcaagaagaaaaacactagacagggaatataaaagtgtattattttttcctcaatattgcggttcattatatttttgaaacagttgtgaatggcttttccttaagtaatatctgggctcttttctctagataatttacaggaaaagagaaatataccttagcaaggcaggctaaggaaaattattttaaaactcaaacatatcaggctaaaatattcatgatgtaaaaacaaagcaaacaaaacaaacagataagcaaaaacaaaacgagaagaaaacatgagaataccaatagaagaaaaatatgtaatttggtttggttccagctctggctgtgattaagcatataccatcctccattttccattgattacaaataaataaatataaggagtctatctgaaaattcagaaaagtaaataatgacaggtgaattggggaatgaaatgaaatggaaagtagtatcaatatggtattaagcttaaaggtattttcagttttcttcttaatcctccagcttggactctaggacagcccaaatcccagaactgcacatcaagcagagacaggaaatgcttcaagggaaacatatgtacctgtctgtattctagaaaagccccagtcacaaagccttagactagtgaaagcagcagctatgcatacacctcaaactctggaagacattctttttttttttttttttgagcagagaaactggaaaactaggttcctattgttctctctctcgctctctctctctgtgtgtgtgtgtgtgtgtgtgtgtgtgtgtgtgtgtgtgtgtgaatcgtcattaattttctctttccagtctctctctggttgttttgccctcaagggaagcaagtcatcatgggaagtgtgaaatagcatagggaacctaaagccctgccatttatgacagaagaccagagaaataagcccctggggactagagagtgaagagaaatcatggaggagaaagtggtagagaaaaagtacacctaattttgtgtatgaagtctcaggctcaccactaattggcgcatgcattgaaattaaccaaggcagcgtaacaactgctttgataattaaactatgatatagaacaaagctcaggttgacccctgggtggttggtatgtgtgtgtggagcagacaaactagctctacaaaggaattgaaaactaaactaacacagaagccagagtctaaatagagcaggttgaggttagacttatgacaagaaccatgggagactgattacctgctaagatgaaaaaaaaaaaaaaaaggaaagaaaagaaaagaaaaatcttctctagaggattttaacaggaccagagtctaatatataatactcaaatgaccataaggcaatcccaaattactaaaaataaaaaagagcatctcaaaagtcaatcaactgacatcaatccccaaggtgacccatgatgttgaaattattggacaaagattttaaaggagttattgtaactatcctctatgaaaagaaaaaaattcttttaaaatggatggaaagaaatgttgtaaaaaatagaaaatataaacacgaagtaaatattttaaaaataaaaaataactaaaaaataaactggatgaatgcaatagcagaatggagatgccagaaaaaaaagaagagtcattgaatttgaaaagtagatcaacagaaataatcctttataaataagagagaaaacacaaataaaaaaatatgagcagagcctcagggacctgtgggacatgtcttacatttgtgttactagaatcccagagggggcaggtaagagattggtgcagaaaaaaatagctaaaaacttctcaaatctgtggaaagccataaatttacagatttgggaggctgagaaacaccccccaccaccaaaaaaaaaatttcatgcaaattctcatacttaaaacactaaaatccaaagataaagaaaaaatattgaaaacaacaagtaaaacaaacactttacatatagaaaaaaataattcaaatgacaacgtattttagtgaaaatcatagaagccagaaagcagtattataatctatttgaagtattgacagtgaaccattaattctaaattctatattaaccaaaaacattcttcagaaaaaagtgaaataaagaccatctgatcatagcaaaattaaactagaaatcaaaaacagatatttaaaaacctctaaatattggaaaattaaataactcactttcaaataatcaaaatatgagagaggaagtcaaaagaaacattagaacatattctgaactaagtgaaaatgaaaataccacaagtgatggtcagttctgtattttcaacttggctaagaggtagtccttgttatttaatcaaacatgagtctaggtattcctgtgaggtattttgtagacatgattactgtataattattttgctttaagcaagaagattctgagttgaaaggcgttaagagcagaactgaggcttccctgaagcagaagaagacattctaactatagattgcagcttcagctccaacttatgcccaagagttccagtttctaatggcttgccctatgaatgttgaacttgtctagccagaacccacgattgcattagccaatttcctgcccctactctctctctgtatgtacacacaaacacacacacacacacacacacacacacacacacacacagagtttcttttgtggaaactgactgatacacctcatattaaaatttctgtaatgcatttaaagctttagagaaaaaagttgtacattaaatactgaaaagttacagcactaaatactgaattataagtgaaaaattcaaatcaataacctaggtttccatattaaaatattagaaaacaaaaaccaaattaagccaaaaccaagcaaagaaaaagagaaatgtcaaaggcaaaagaaaaaaaataaatgaaatttaaaatagaaaacaacagatagagtcaatgaaatcaaaaggtggtttgttgaaaaggtcaataaaatttgataaacttctaagaagactgaccaaagagagaagtagcaaattactattagacatgaaagaagacataatactacagacctcacaggcattaaaatgatattaagagaaaattatagacaactctattcccccacatttgacaactcagattaaatgaatcattttattgaaagataaaaactaccaaaactgacaagaaatgggaggtagtggtcacctggatcagcagtctgaggcactcaacccttactgtgcgtagattctggtgcagcgatgccctctctgctccgtgcccaagcagatctccgggcattcaaagcaccggctcacccggattgacagcctgagctgcctcacctttcctgcacagaaatcatggtgcatccaggccctctccacttcatgcccaagcagatctccaggcagtcaaagcaccaagtcacctcgatcagcagactgagccacccaactcctcctgtgcagagactgtggtgaagcagggccctctctgcccaatgcccaggcatatctccaggcagtcagagcacaacatatttgcatggattataagcctgaactgccccaccctttctgtgcagaaattgtggtgcagtggggccctctacactctatgatgaggcagataaccaggcatctggagcacacactttcctgaatcaggagtttaggctgaccttgccacttgtgcagagaacttcaggcaaaaaaggtttcccagccccttgcccagtcacacctttgggggcttggtggcccttcactcatttcttccttggtgctgatgcatgtggctgacactgggggacctgtacatgggcctgcccggtctgacctcacccatctgggtccccaaacccctcaggactgaggagacagctcagacaactgtgggctccatggatgagcccattgctagaggtagaagctagagcttctactggtaaacaagaataaaatatatacccaggcatgttggccacaaccagctcttacccataagtaccatctactggcttgtaagtcaaaccacagaactcaatataaatttaccaagaggaagtgcatatggctatagaagcaaaacaaaaaaccatattcaacattctctatggtcacaccccacagggagtggggggaaagagaaagggaaagaaaaaacccgctaatgatattatagggaaataaagaaaaaagggaaaaatcctacacacagttaaataattataaaaattagaagtcctattatctctggatgagaaaaaaatggtgcaaaaattctggcaccatgaaaaatctgaatgtagtgatgccaccaaaggatcacagtagttctccagcaatggtctccaaccagaatggaaattcagaaatgacaaagaatccaaagcatgtattgagaggaagctcaatgatatctaaaacaaggttaaaagtcaacacaaataaactcctaaataaatcaatgaaatgaagaaagagacaaacatcttaaaaagaaatcaatcagagcttctagaattgaaaaactcaaggaattgcaaaatataattgaaagctttaacaatagactggactagaaagaagaaataatttcaaagcttgaagactagtcttttgaactaacccagtcagacaaaaattaagaaaaaaaatttagaaaaatgaacaaagtctttgagaaatatgagattgtgtaaagtgaacaaaccaacaaattattggcattcctgagagagaaggagaaaacataagcaaccttggaaacatatttgaggggctaattcaagaaaacgtccctaatcttgctagagaggtagacatctagatacaagaaatccagagaacacttgcagtatcccatgcaaaatgaacatcaccaaagcagttacccaccagactgtccaagatcaacactaagaaaaaaatctcagaggtagctagagaaaaagatcagatcatgtacaaaaggaaccacctaaggctaacagtggacttctcagcacaaacctgacaagtcaggagaggctggggtctatttttagcacttttaaagaaaagaaattccaaccaagaattcacaacttgtgaaattaagctttctaagtgaaggagaaataaaatattttaaagacaaacaagtgctgaaggaatttgttactattagaaccggcttacaagagacccttaagggaattataaacatggagacaaattaatgacacctgctaccataaaaatacacctaagtgcatatctcacaggccctataaagcaaccaaacaatagaaactataaagcaaccagcaaacaacttcacaataggataaaaatcttgcatatcaatattaaccttcaatgtaaatagtctaaacaccccacttaaaaggcatagagttgctagttggataaaaaacaagactcatccatctgtggtcttcaagagacccatctcaaacataaacacactcataggttaaagtaaagggctggagaaggttctataacacaaatagaaaacaaaaaagagcagtggtcagtattcttaaattgcgtaaaacagactttaaaccaccaacattaaaaaaaggaaaaagaggggcatcaaataatgaaaaaaggttcaattcaacaagaagcctttactatcctaaatatatatgcatccaacattggagcacacagatacataaaacaacttctagaactgtagaaaaaacttacacagccacacaataatcatcagggacttcagtaccccaatgacagcattagatggatcatcaacgcagaaaactaaaagaaattctgaacttagacattttgaccagttggacctaatggacatctatataacactccacacagaaaccacagaatatacattcttctcaactgcacatggaacatacaacaagattgaccacattcttggccataaagcaagtctcaataatttaaaaaaaaattgaaattacaccaaccatactctcagaccacaatggaataaaaatagaaatccacaccaagaaaatcccctgcccccaacagcacaattacatggaaatataacaacttgcttctgaatgtcttttgggtaaaaaacaaatttaatgccaaagtcaaaaaaaaaatctttgaaataaaagactccatataccaaagtctctgtgatgcagcaaaaacagtgctaaaaggaaagtttaaagcactaaatccctacctcaaaaacttagatctcaaattagtgatctatcattgtacctagagaaacctgaaaaacaagaacaaactgaccccaaagctagcaatagaagagaaataactaaaacaagaccagaactgaaagaaattgagacccccccaaatccatacaaagggtcaacaaaaggttcattgtttgaaaggataaacaatttcaatagaccactacttagattaaaaaataaacagaagaggtccagataagcacaatcagaaacaacaaaagtgacattataaccaataccatggaaatgaaaaagatcctcagagagtataatgaacacctctttgcctgcaaactagaaaacctagaggaaatggataaattcctggaaatgaacaacctcccatgactgaatcaggaagaaattgaaaccctgaacaaatcaataatgagttctgaaattgaatcagtcacataaaaaagccccaaaccagagagattcacagctaaattctacccgacaaagaaaagctagtatcaattttactgaaactatttcaagaaatcaaggaggaaggactcttccctgactcattctatgaaaccagcatcagcctaatactaaaacctggtaaagacaattaaaaaaaacctgcaggccatagacacaaaaatccttaacaaaatactagcaaatcgaatccagcagcacatcaaaaagttaattcaccatgatcaagtaggcttcatttctgagatgcaaggttggttcaacatacacaaatcaatacatgtaattcaccacataaacataattaaacccaaaaatcatacaattatctcaatagatgcataaaaagccttttataaaattcagcatctcttcataataaaagccctcaagagactaagcatcaaaggaacatactccaaaataattagagccatctatcacaaacccacagccaacataataccaaacaggcaaaagctgaaagcatttgaaaatgtttcttagaactgggataaaacaaggatgcccattctcaccactcctatttaacatagtactaaaagtcctagccagaacaatcaggcaagagaaaaaaataaaaagcatccaaataggaagaaaggaagtaaaactctttgtccacactgctgataatgattctatacctataaaaccctaaagactctgtcaaaaggctcctggaactgacaaacaacttcagtaaagtttcatgttataaagtcaacatacaaaaatcagtaccatttctatagaccagtaacattcaagctgagagccaaatcaagaatgtaatctaatttgcaatagccatacaaaaaacacctaaaaatatatctaaccaaggaggtgagagatctctacaacaagaacttcaaaacactgctcaatgaaatcacagatgacacagacggaagaacattccatactcacaaattggaaggatcaatatttttaaaatggccatgctgcccagtgcaatctacagattcaattttattcctattatactaccaatgttatttttcacagaaccagaaaaaacaattctaaaatttatatgaaactcaaaaagagcccaagtagccaaagcaattctatgcaaaaagcagcagccagaggtatcacattacctgacttcaagctatactacaagcctacagtaaccaaaacagcatggtactggtacaaaaacagacatattgatcaatagaatagaatagagacccagatataagccacacacctatgaacatctaattttcaataaagtcaagaaaaataagcaatgggaaaggactccctattcaataaatagtcctgggatagctggttagctgtatgcagaagaatgaagctggacccctacctttcaccatatatgaaccttaattcagaatgaattaaagatttaaaagtaagacctccacctataagaatcccagaaggaaacctaggaaataccattctggacagaaataaattctgccttgggacagaatttatgaataagtccttaaaagcaactgcaacaaaaacaaaaattggcaagcaggacctaattaaataaaagagcttctgtacagcgaaagaaactatcaacagaccacacctacagaatgggagaaaatattcagaaactacacatctgacgaaggtctaatatctagaatctctaagaaacttaaacaactcaacaagccaaaaccaaccccattaaaaagcaggcaaaagacatgaacagccacttctcaaaagaagacaacaaacatatgaaaaaattctcagcgtcactaatcatcagagaaattcaaatcaaaaccacagagataccatctgatgtgtcagaatggctactattaaaaagccaaaaaacaatagatactggtgaagctacagagaaaagagaacatttatacactgttgatagaaatgtaaatttgtttagccactgtgaaagcagtttggaaacttcttgaagaatcttagaactacaattcagtcaacaattccattactggagatatatatatatatatatgaatataaataattctaccaaaaagacacatgcacttgtatgttcattgtagcactattcacaacagcaaagacgtgaaatcaacctaagtgtccctcaatggtggactggataaagaaaatgtggtacatctatactatggaatactatgcagctataaaaatgactgatatcatgtcctctgcagtaacatagatgcacctggaggccattatcctgagcaaattaattcagaaacagcaatctaaatactgcatagtctcacttataagtggggcctaaacattgggtatttattgacataaagatgggaacaatagaaatgggggactactacaggggaaagtgagagaaggggacaaagagttgaaaaactgtcaggtcctaccttggtgacagaatcatttacattctgaacatcagcatcacgaagtatacccatgtaatgaaactgtacatgtatccctgaatctaaaataaaagttgaaattataaaaaaaaagaaaataaggagatagaatacgaaaaatggcctcccaatattttccagcttaatgcctggaactgtgggtatgatgagatatcattcctgtgtgttaccctatattgaaaagggagattattgaggtataagtaatctaatcacatgatccatttaaaagcctagtgttgtctccagttgagaacagagaggaaagtcagagacatcccaagtgtggtgaggatacggagcaagagaaactctaacattgctggagggaacataagatagtacagcaactctagtaaacagtttgataatttgttataaagttaaacatacatctttataacccacctaggccacagcacagcagtaccctacagaaatgaacactatgttaaatcaaaacctgtatgcagatatttatagcagcattcttcattatcaccccaaactagaaataccctaaatgtccttcaactggtgagtggataaagaaacagtggttttgttgctgagaagtattccatgttatagatgaaatactactcagtaataaaaaggaatcaattgctgatacatgtaacaccatgaatgaatctcaaatacattgcactgagcaaaaacaaaacaaaaacaaaacagattcaaaggttgactattgtatatttccatttatacgactttctaaagaaacagacactatagagacagacaggtagtggccaaaggttaggaaatggggattaatattgaccacagaggggtaatactaggggatcttgaggggtgagtgaactgttctgtatcctgattctggtagtggttatgtgactcagaactatacaccacaaaagagtgaattttattgtacataaataaaaaataaaaacagtgaactgctttgattagcttctacattgtaatctaagattttaaactcaaatttgtatttatgtggcaatgaagggcatgatgatactcaccaagtagttttaggaaaaaatgatttactcagtttaaatatttaccttgaaaacaaacctataaggtgaacacaatctcatttttaaccgcattaaatattagttttcttttgtttttaacttgaactacattgaatatcttttttctaagctgccttcgtctaatagacattgctcaggtcttaaagaatcatcaaagcatggatttttttctctccaccgagctttgataagaaagaaaacaaaagcccacatatatttggataaagtgcagcaatctgttccaaatatcatgtaaaatgtcttcaaaacctaaataagcatgctttttgagcttcatctcctgcctagttctccactcaacactcccaccacgatgaactaattaacaacagtaatatggttattacaaattatttaccatcttctctgtgacagacactttgctagatgctttacatatgccaccacattccaggtaaaataatggttcctattttacagacgagaaaacacactcatctaggttaaacacttgcccaagttcacgtatctggtaagtggacagagctgtaatttcactgtgcgtctgagtccagatggctatgccctttctattactactacaccacactgatagttttcttattttcccttaatagtttttcaaatgtgatgccttttttcaccttatttctagcaaaccgactgacagtcttagaggagaacagtgtcccctctagaacgtcttccctaatctgctatgttgaatagaagaatagattggaaccgtaagaaacagcccagttcttatttcaactcagctacatattcatatttccacacagatggatatttattgagtaccccctgtgtgcgagggattgtgttaagcaatggagattagatcaaaaattttataaaagaaataaaccataagaaacttttgtggggatcttatgagtaggaaataagcagaaaagtccactccaggcagaggcaaacagtactaacaaagaaacggaaaaaaaataaaataaaaattatgctctgagaaactaccctttctgccccttaaatgctctttgcttctcttcacagctgtctgacagtgggaattggatgctctaactgcagtgaaatgaccaaggcgtatggagttactgagtgagctgtttgtagagtaatataagctcaaagaatagctagctcaaggagtggaaaggggaaagatggaacgcacacctcaggccaatgtagatttttactccaaatagaattttcatagcctctttaattaaaaagatactatgcaaggctgggcaaaacttgtccaattctgagctacccaagctaagtctttacttcatttaaatcctattaaagcacaatcttctcaaatatccttttatgacatctagaaagtcttattcttcaatttaattttatgagagtgtggattaaaaatatatatgaaaaacaaaaggaattatccaaaaaggcatttccttcaggaaagaaaaaaaaagtcctccacaaagtaaaaggaatattttagttttattatttttttgttcctcttacacatgaggaataaaaagagaatggaaagtctaaaaatcggaattaaaagctactactgcagcgtattttaaattttattctatatagctttcagagaggaaaagcgattctgttattaccctgcataatttttttatagcagagcatagatgtgttgctaatccaatgctaaaatgactatttggcttattcagaattatttgaaccattaactcgcatgagataagcatgatatgcattaatccttttgtgatctaattcatcagtctttccaagttactaaagctattcttcacagattctttattcttctatcctgaaaatattgtgttttgtttattctgcttatcacaaatcacagagaagtttcatttgctttcttactatttccttttaaaaataaagtcacatttatattgtcaggtaaaatacctacacagaggaaccaagaagaatcggcaataataagtggttttgagactggaaagagaagcagtagagaaagtggacaagcagtgatgaaaatttacttgactacacaatggatttgcatgggaaatattgccctgaccattccatatttgggtaggtactatttggtaattggtgttcattcattagtgggtatgatctaaatatggatttcaaaatacactatgaaagaaattccagatcagacttttgacttgaatggaatatttccataagctaaagatctacagctgttcattaatttcagaccaacatttttggaaagtctcaaaccactccatatttccatgaggagtgcctagaaatgaacctagaataaaacatgctcatttttacaggcacctccgagcttacagtttcttatctgtaaagggcaacattatgcttactatcttcataggattaagagcagaaaaatcatatggaacttctacccagaaatttctttcataagaagcacaaaatacttagtgagattttgtttaagtctgtccttgggcatgataaatcaaaactacatctgtgtatgagacatggatcctgtattataaaggaaatcttcagaaagtctaggcttttcttgttgaaggataaagcttagttaacattatttggggatgatctagctagagagcaaccactatagaaaattattacttgcttaatcaggacttgtgctatttcagataacattaatgtaggagtgaaagttaatcttatttactgattttttattagtaggcaaaccagaattttaacaagatattggaaatgtttaaaaatattaatgcatttttgagctttccatttctaccattttaaaaagaacttgtgttttatagtgtcctgtgttaataaaaagctattcttacttatacataaaataaagatgctagagatctattttattagcctaagctagtataacgtatatttaaaataattttaaatatttttcttagaaattataaaagttaaaattgaaaatttaattgatttcttcccaatttataataattattcctgtattctaccaaccaacatttatttagtttctattgatttatcagagtagtcatttgatcacactagagtgggattaaaaaataagcacaatttttttaatttcaaatatcttgcagcctcggaggaagaaaaagatatgggcatatgtaattatataacaaaatagaaccagaaattttagaaaatgtgatatgtgagttatataagggaagcatgccatttggggaatcaaaaaaagaacaagattacagaagaaatgtgagattactcagttctttcttttttctggtcatggaaaggttcagactgaacactgaaaattttttggagaccagctgaaaaaccatgccatggtcataatttgtcattttactttttatcctcactaatattcatgagtcctcaatctttatttttagattccatatctaaagttaatactcaagattatcgatggtattctaaactaagttttgtacaatgcacttttctgaacatctaagttatctgaaaacaacagttgtgaccttcattactgttatagatacagagattaataagaactgatatagaggtgggtaaaaccattgatatagagattcgtaagactcctggtcttagaggaggtccatccattaaaggaagtggattcaagaacatataaatctaatatactgtaatagcacaatgtactgggtgatcaaaaagaggcccttgtttgaaaatatcacacatttctgaaaaccatgtcttaaaacaaaaagtgaaatatctagcatagtgtgctaatcttttcacctctgaagacaatagaaaagattaaattagtaagtaaaggagagaagtaataaagaaaaaaaaaacagaaatctaaaaccaaaaacttagtaagcagtactaaaagaatgtgtcaaaacatgaaggccagcttatcaagagaccatccaaatgctacctatataaaaatgaggaaaaatgcaagcatggctattgggaatcacaaggacagaatttcactcatatcacttcaggctgatgtggtcaaattgattaggaaatgctggaaaatgggtctgcagagtactagccaattgatgaggcagcattctacagggtctcaatctaatttagtattaaatactaattagcatcaccaatttcagttcctgatataacagagtaatgaataccagatcaaacttcctgccataaacaactatatgactagaagttaatattttcagacatggataagagagaacacaaggctgtgatctgtgaaagaaaaacacaccaagtgagatccatactgatcctgaattgttgccagagggcacatttcgagtcttgacatatggagtggagcccatgcaaggaggagcattctcagctggatgaaggaaacacattggactacagagattgtgaggggcaggaatctttcagcagggaagaggacaggaggacgctctgcagataaggagctccagaaatctgcctacgagtctcctagactgtagtgagtattacagtgtacataagcaaggctagactttgtgaggtctagcagagaataacttctggggaattgtgagctgaatagagtttctgaagcctgcataatatggggaaatactgtagttctgacattcagagtggagagactttcctaatgcctcaagcattcagctgaaatttcataaaaattgcaaataaagaatagggatacacgagccttaaagtagtctttagacccattctaacaaagccaaatccaagtctccacagcataaatctgattctccagaaaattaactatcctctgttagaaagagacaatgctttttaaagaaagacaataatatttcagctctaaatatgaagtgaccacaatgtacatcagaaaataaaataactactagaatgtgaagcaggaaaatatgacacataattgggaagtataatgtcaacagatgtggataagactgatgctgtaattagcagataaagattataaaagtagctatcataaatatgttcaatttttctcttcaaaaagataaagtaagcatatacttatttccttgatgagattatataatctcattaaagaaaaactacaaaaaagaatagaaattctacaactgaaaactacaagataaatttttaaagaaattataggctgggcgcggtggctcacgcctgtaatcccagcactttgggaggtagaggcaggcagatcacgaggtcaggagatcgagaccatcctggccaacatggtgaaactccgtctctactaaaaatacaaaaattaactgggcatggtggtgggagcctgtaatcccagctacttgggaggctgagggaggagaatcgcttgaacccgggaggtggaggttgcagtgagccgagatcacgtcactgcactccagcctggcaacagagtgagactccatctcatttaaaaaaaaaaaacaaaaacaaaaggaattgtatagccttatcagtagatggacaatgccaaagtaatattagtaaactcgcagacaagaataaaaggagtcatacaaactaaaacaaaacaaaaaactgtaacaaaaaaaaagaaagaaaagagcttcaatgatctgtgagacaatgtcaaatagtccaaatagtctaatgtataattgaaatgctagaaggagaagagagagaaaaatttggcaaaaatattatttgaagaattaatgatccagctgctgaaaacttattttactattttaccgaaaataaaattttaaaagctgtcagaaaaggtacattacatacaagagaaaaatgataagagttgttgctgacttatcagaaacaaggcaagtaagaagaaaaggggacatgatagggctgaaaaaaactcttgttcagcccagacttctatacccaacaaaatatctttcaaatataaaggtaaaataaagacatttcagtaaaaaactaaaatgaggagaattttaaaggcaagaaatgtcataatatttttatgttaaaggacgatggaacacatatctagttgaaagaatgaattgcacaagaaatggtaaaatgtataggtaaataaaacttgtgtttcttggagagttaatattttgaagagagactgcagtaagttaaacatgcacattataatctctagattaataaatagtaacctaaaaaggcatggcaaaaatgtcaataaaggagaggaaatagaatactaaagattattcagttcaccaaaaaggaggtagaaaaggagaagttgaagtaacagagcaaacagaacaaatagaaagcaaaaatgaaataacaaagagaaaatatagaaaagtagaaaataaaatcatagtgtgcttaatctaaattgtaaataattacattaagtgtcaacagactaaatggcccacttaaaaggcaaagactgtcagattatatttaaaaagcaagagtctggctgggcgaagtgactcacgcctgtaatcccagcactttgggagaccaaggcaggcaaatcacctgaggccaggagttcaagaccagcctggctaacatggtgaaaccccgtctctactaaaaatacaataacgtagacaggcatggtggcgaatgcctgtaattccagctactcgagaggctgaggcaggagaatcgtctgaacccggaggcagaggttgtgatgaggcgagatcgcctcactgcactccagcctgggcgacattgtgagactgtctcaaaaacaaatgaatgaataaataaataaatacaaaaattagctgggtgtggtggggtatgcccatagtcccagctactgaggaggctaaggcactaaaatcgctagatcgttagaaccgaggaggcggaggttgcagtgagctgaggtcgcgccgctgcactccagcctgggtgacagagttagactctgtctcggaaaaaaaaaaaaaaaaaaaaagcaagagtcaactatatgctgtttataaggaatattctttaaacacaaagacacaggtcaaaaggaaagggatggagaaaacatcatgaagatgttaatcatgtagaagccaatatagttatatagataccttacaaattagacttcaccaagtaatgcattatcatagataatgatgcatattttataatgttgaaagtgacaactcatcaagaagacataaatcttaaatgtgcattcatttcacagaaaatctctcaaactctcaaagtttctaaactaaagggagaattagatttgttcacaatcgtagttaaaaacagtaacaccagtctttcagtaattgttggaagaaatgaacaaaagtctgtaagatatagcagttttgaataacattataaatcatcttgacctaattaaaacattacacataagaactgcaggatacatattcttttcaagatagatcatctactagtttatttcagactatcaataatcacatagattgcattctctggccaaactgtcatacattaaaagttaatcattattttaagaaaatacgcacatatttagaaattaaacaacacagttctaaaatacttatgtgtcagacaaggaagcccaatggaaatttttaaaaattactgaacataaggaaaatacaaacactatgtattaaaatttgtagaatgcagttaaagcagttcgtctgggggaaatttatagtgttacatgtctacattagaaaggaaaataaaagctataaaagcaatggtctaagatttcatcttaagaagataaaataaaaaacaaattaaattgaaagtaaatgaaagggaatgttaaaaatgagagtgaaaaaaagacaaaaaaaaggaaatcaacaagatcaaaatttgaagaaaagattagtaaaattgattaataaaactcatcacgatgaaaaggtaaaacaagaatcagcagtatcagaagcaaaagaagggacctttctacagacattataaagatgataaagaaatattatataattttatgctaattagttttacaatatagattaaacgggcagattccatgaaacaaaacttagcaaaactaatagaacaggaaatggaaagtgtgaccaaccctgtatacattttagaaacttaattttaattaaataattcttaggcacaaatggcttcactggtgaatactatcaaatatttaagagctgtacaatatccatttagcatattctttttcagagaatagagatggaaatcttcgcattttattttatgaaaatagcatatctttgataccaaatccagacaaaggggaaaaaaacccctcaaaatcctgaccaatacctctcatgaacccagacacaaaaattcttaacaaaatattagtaaacaaaacccaataacacatttttttaaaaaaaggttctatataatgactaaatgaatttagtacaggaattcaagcttggctaaatatacaaaattaaattaatgggatttactccattaaaatattaaagaaaaaaagcatataatcatttagattggctcaaaaaatctatttttaaaaactaaacagtcaatcatggaaaaattcttagcaaactagaaatggggggaagtcttcaaactaatacaatgtatctgctaaaaacttatagctaatgacataaatgattataaaatattcaacacttttcttctgagatctagaaaaagacacagatgtatattgacagcatttcatttaatattttactagaggtcctagatagttcagtaaagtaataaaaataaatggcatagagattgtaaagaggtaaagccattgttgtttatagacactgtgattgtgaacacatacagttctaagaaatccgcagaagaaaaattcctgtgaaactaaagtgaattcactaatactgcagaatacaatccaatctagaaaaaaattcggattctatataccggcaataaacatttgaaaaataaaaacaaaaatgtcattcaaaatattcaaatcataaaacttttagggttaaatttaatgggtggtgtgcaagaatgctctgctgacacaattaaaatattgctgagagaaattcaagaaagtccaaataaatggaatgatataccatgcttagggtttggaaggctcagtattaataaaaagtcttttatctttaaatagatctaaaaattcaatgtaattcttatcaaagtctcagaagccttgtatttttaacagaaacaaatggattctaaagtttatataataattcaaataatctaaaatggccagaacaatctaaagaacaaagttggataacttaaaaacttaccgtaaagcttcagtaatcaaaatagtgaggtattcacattaatataagcaaatagatcaatggaacagaattaagagcccagaaatagatccatgcttacatactcatatctgtgtgtgtgtctgtatgtgtgtgtgtgtgtgtgtgtgtgtgtgtgtctgtgtgtatgcaaaggtaccaaagcaatacaatggggaaaataagctctttccaacaaatggtgctgctgcaactagatattcatataggaaaaaataagcaaactttaacctctacttcatatcatatcattttcaatgaaccaggataactaaaactataaaaagtatacaaaaaatgtacaaaaagatctttttggtcttaaggtaggcaataatatctgaggcagaacacaataggcattaaccattaattgaaaaatgaataaattatatttcatcaaaatgaaaaatcttctcctcattaaaaggcctttgcaatgtaaagctatttgttgctccatggttgcctgaatgccagcacccacccccacttgttttgaacttttacctagtcattgcccatctctgggtactcatccctaacatgtatattttcaagcaataagtctcatgatgacttcaccgttttaccccttctttcctttccatagtaactcagttacattcaaattacccataagaaggcttcctgcatgccacagctacttcacccatgaccctcagtaaagccacttgcctagaggtccttattctgtttcctccctgcctgccacaaacgtttggcttttgggtgactttgcatggccctctgagcatgtggtgtctccttctctaggacctatgagtataataaatcctttaatttcttatgcctctccagatataatttccgtgaccatactggagtgaaccttaaagaccccacaaggggtatttcctcccccacttatgacacagccttaatgagaaataagcctgtaacagatagaaaaaagtatttgcaaaacatatatctgacaaagaacttgtacccagaacaaatatcttagtaatacaaaataaacatcttaatattttttaaacttttattttatatttaggggtacatgtgaatatttattatataggtaaatttgtgtcattggggtttgttgtacagattatttcatcacccaggtattaaacctagtacccaatagctatcttttctgctcctctcccttctcttccccaatcaaatagaccccagtgcctgttgttttcttctttgtgttcatgacttctcatcatttagctcccatttataagttagaacacatggtatttggttttctattcctgcatttcataagaatgaaaacagaaatctcacgaacgtctcaataaatcatctatgtctagaataccccttctctgtctcctgagttcaataatatattctacttaaataactgagaatggacggcaggccttatttgtttacatggattccatgaaatgcaggagctacattttctgttactgctattgtttgttagggattagtacccagagatgagtacccagcgccatccgcgatcctgcaaaagacacggtcctgttttttaagactgcatagtatcccatggtatatttgtacctcattttctttatccaatctgtcattgatgggcatttagattgattccaagtctttgcttctttgctattgtgaatagtgctgcaatgaaagttcacatgcatgtgtctttatgttagaatgatctatattcttctgggtatatacccagtaatgggattgctgggttgaattctagttctgcttttagctctttgaggaatcctcatactgctttccacaatggttgaactaatttacacccccaccaacagtgtataagtgtttccttttctccacaccctcgccagcatctgttattttttgactttttaataaaagccattctgactggtgtgagatggtatttcattgtggttttcatttgcatttctccagtgatcagtaatgttgatcttttattcacatgattgttggctgtatgtgtgtcttcttttgaaaagtgtcccttcatgtcctttgcccactttttaatggggttgcttttcttttatacatttaagttccttatatatattgggtattaaacctttgtcagacacacagtttgcaaatattttcctccattctgtaggttgtctatttactgagagtttcttttgctgtgcagaagctcttaagtttaattagatcccatttgtcaattttgcttttgttgcaattgattttggtgtctttgtcacaaaatctctgcctgttcctatgtctaggatggtattgcctaggttgtcttccagggtttttatagttttagattttcaattgaagtctttaatctatcttgagttggtttttgtatatggtataaggaaggggtccagcttcaatcttctgcacatggctagccagttttcccagtgccatttattgaatagggagtcctttccccattgcttgtttttgtcagctttgttgaagatcagatagttgtaggtgtgcagcatcatttctcgactttctcttccgttccattgaccagttacttcacaaacagttatttacaactagacaacatgcacgtgaaaaactattcagcatcattagccatcagggaaaatgcacattaaaaacacaattgattatcactacacacccaatggaatagataaaattgaaaacactggtgacaccaaatgctggtgaggtgaaacaactccaatacccatacattgctgttgcaagtataaaatggtactgccattttggaagttctgatagtttcttaaaaggttacagatatacctaccataagattcagccttttcactgttaaatatttacccaataaatattaaaatctatgttgacataaagacttgcacacaaatattcatagtatctttattgatcataaccccaaactgaaacaccccaaatggtcatcaaaaatcaaaaggaaaatagataaactgtgatagaatcgtacagtgaaatgctgtctggaagtaaaaagcaaagatcgattgacacatgcaacatgcgtgaatctcaaaaacatgatgttgagcaaaaatgtcaaacagaaaaagaatacatattaaaggactatattatatgaaattctaggataggtagaactgacctatggtgaaaggaatcagagcattgattctctctgagagagtggttgattgagaaaggatccaaggaaattccctggggtaatgaaagtgttatatcttggtggaggtgtattacatagacatttacacttgtcaaaattcactgaattttacagctatggcatatgcatttcactgtaaataaataatattttcatttctacaagactacccatgtgattagtaataaaacctgatacttgcttctgcctttcctaggagagccatttaatttcttttctcccccattactgggatgtacaacaaatgataatcaaaatagcagattttgacagtactgaaattggtcagaacactgggaagatactgcataagacaaaagaactcacttaaatgataagaagaaatgggctgaattcagaaaaccagctgaatttatttaatatatttttccctaacattttctacagtaagcccaacatgatgtaatatatgagggtattaagaagttaaggcacacttggaaaattgccattcagacttatagattaaacaaatatcagatgtggaactacattcttaatcatgaaattttaacttatactgtcagactatacaaattatttggaacatttcctccctcttcaaacatttagaactataggggccaggtaaacatcaaggagaaattatgcataaataatacaggcactgtgctttcacagagtgtttttcctggtatttaacatttgccagtgtgtctactgtgtgcaaccttccccctcaggatttagctgtggtggcaataaaggcagtgaagttaggaagactctcatcactactatcaacagccacattgtgttcagcttcttggttgacttaaattgtgcaatcagggtctatccacacattcagctatattctgtcacttatgatggagccttttgtgtctatgagttaaaggtgtccagggagggaaatgtaatgccctgactcattccaacctttaaaaacaaagcattaagtcaagaatatagtaaagaacatcccagtttcacatgttcaaactttggttgaactaatttgtaactgcaaagaccattccaaactgtgtctagtggtcaagactcctttatgtctctttctctatttggaatgttttctctctctttttccctgatggttaaagccctactctgccctactcttcactcaagactggcaaataccacaaccttttcccaataaattacatcatcaactttaggtattttaaatatatttgctcatgtctcttttttacaggactaggagctcattgagggcaggtattttgtaatattaatctttgtccctggggtctggttcacagtacatgtcaaataactgtttgatgagggaccaatgacccgtagaaagcagaaattttgaaataccatcactcctaaaattagattaggtgccaactttataaagataatttcagcttaagatattcagttatgttttagattattttttctcgagttttcctctacagtaatattgctttttatctcaagcctaatctactttcacatctttgagtctgctttcaattttttataggaaatttttttttatatttcattttaaactcttttgtgttttatatttggtcacccttaatagagtgtgccatttatccaccatgaaactaactctgtccagattactcaccattttatgttccctgtcagctttcttcacatcagcaaacctgaacacttttcaagctatattcctatctagggcattcataacagagagtggtttctgtcatcatgaataacttttctttctttcctaaaaacaaattggggattattgtacacaatctctctcacataaggctttctgatttgtctgatttattccagtatgatatgcaatatcaaaagtacattggaaatcttaataaattatctgtacctagagtacctcttctgtctcttgaatgcaataatatactctacttaaataactctgagaatggatggcaggtcttatttgtttttgtgaatcccagtttacaaaaaaataaaaaaggtgtttttttttccagatgactgcatatgtatttcaccttttatttgtttactttttattgatttaaagtcatatacaaaagcaaaacaaaataagacaccatgtctggctgtatatcaagcataaaaaacactataattaggtaaagtttcagcaaacaatcagcaacaagatggtttagttcctggacaacaataatgaaactcaatgactttgttagtccctcacactgtcatgattggagataaaatttttaaaatcctatgccaacaaatcaaggacagtagtgtcactgcttgggtggcaggggaagcttgccatataaaaaggtgaaagaccttttcaactattttggtaagagcacctcaccttgatttctgttctttttggcaaatatttccaacacgaagtctctatgcaagagttgactttgaatagtataactatcattactattgtatttgattatcttccccaaattattcttattctagtgtttttcaagttttaatgaattctgattctattagactactaatgtaatgaaagcactctaccctttcaccaagaaatgtgcatctataattctctatacaatctcacagaatagtatgatgggaaaagagatacaaaacaaacacaaataagaagaaaccatgcaaatacatggaaattaaataacctgctccttttgggtcaaaaacgaaagcaagatggaaatgaaaacattctttgaactgaacaaaaataatgacacaacctaccaaaacctctggaatacagcaaaggcggtactaagaggaaagttcatagccctaaatgcctacattgaaaaggctgaaagagctcaaactgacattctaaggtcacatctcaaaaaactagagaaacaagaacaaaccaaacccaaacccaacagaaaaaaggaataaccaagatcacagcagaactaaataacatagaaacaaacagacaaaaaatacaaaagataaatgaaacaaaaagctggttctttgaaaaaataaataaaattgacagactattagcaagattaagcaagaaaagaagagagaaaatccaaataacctcactaagaaacaaaacagtacatattacaactgacaccactgaaatacaaaagatcattcaaggctactatgaacacctttatgcacataaactagaaaacctagatgagatgaataagttcctggaaaaatacaacctttcctgcttaaatcaggaagaattagataccctgaacagactaataacaagcagagagattgaaatggtaatttaaaaattaccaacaaaaagtccaagaccacacggattcacagcaaaattctaagaattctaagacattcaaaggagagttggtaccaatccttctgacactattctacaagacagagaaagaaggaaatctccataattcattctatgaagccagcatcaccctaatacccaaaccaggaaaggacataaccaaaaaagaaaactacggactgatatccttgatgaacacatatgttaaaatccttaacaaaatactagctaactgaatccaacaacatatcaaaaaaataatccaccatgatcaagtgggtttcataccagggatggagggatggtttaaaatatgcaagccaataaatgtgatacaccacatatgtataattaaaaacaaagactacatgatcatcttaatagatgcagaaaaagcatttgacaaaatccagcactccattatgattaaaactctcaacaaaattggcatgcaagggacataatgtaataaaagtcatccatgacaaacccacagctaacataatacagaatggcaaaacgttgaaaggatttcctctgagaactggaacaagacaaggatgcccactctcaccactcctcttcaacatagcactgggagtcctagccagagcaatcagacaagagaaaaaataaagggcatccaaactggtaaagaggaagtcaaactgtcactgtttgctgatgatatgattatatacctagaaaaccctaaagactcctccaaaaagctcttagaactgacaaattcagcaaatttccagatacaaaattaatatacacaaatcagtagctgtcctatacaccaataacaaccaagctgagaatcaaatcaagaactcaaccccttttacaatagctataaaaaaacaaaaatacttaggaatatacctaacaaaggaggtgaaagacctctacaaggaaaactacaaaacactgctgaaagaaatcacagatgacctaaacaaatgaaaacatatcccatactcacgggtgggtagaatattgtgaaaatgaccatactgccaaaagcaatccacaaattcaatgcaattaccatcaaagtaccaccatcattctttacagaactagaaaaaacaattcccaaattcatagggaagcaaagaagagcccacatagccaaagcaacactaagcaaaaaagaacaaatatggaggcaggtaccacattacctgatttcagactatactataaggcaacagtcaacaaaacaacatggtactgatataaaaataggcacatagaccaatggaacagaatagagaacccagaaataaacccaaatacttaaagccaaatgatctttggcaaagcaaacaaaaacaaagtaaagaaagaacaccctattcaacaaatggtgctgagatatttggcaagccacatgtaagagaatgaaactggatcctcatctctcaccttatacaaaaatcaactcaagatggattaaggacttaaatctaagacctgaaactgtaaaaattccagaagataacatcagagaaatccttgtagatgttggcttaggcagggatttcttgaccaagaacccaaaagcaaaggcaagaaaagaaaaaaacaatgataaatagctgagacttaattaaactaaaaagcttttgaatggcaaagggaagagttagcagagcagacaacctacagagtgggagaaaattttcacagtctatacatttgacaaaagaacaatatccagaatctaccacgaacttcaacaaattagcaagaaaaaaacaaataatcccatcacaaagtcggctatggacatgagtagacaattctcaaaagaagatacacaaatggccgacaaacatgaaaaaatacttaacatgactaatgatcagggaaatgcaaatcaaaaccacaatgcaataccaccttactcctgcaagaatggccataatcaaaaaatgaaaaaaaagtagatatcggcatggatgtgctgaacagggaacacttctacactgctggtgggaatgtaaactactacaaccactatggaaaactgtggagattccttaaagaactaaaaatagaactaccatttgctctagcaatttcactactggatatctacccagaggaaaaaaagtcattatatgaaaaagatacttgcacatgcatgtttatagcagcacaattagcaactggagaaatgtggaaccaacccaaatgcccatcaatcaatgagtggataaagaaactgtgatacaaatatgtatatgatggaatactacttatgatggaatactacttagccataaaaaggaatgaattaatggtattcatagcaacctggatgagattggagactattattctaagtgaagtaactcaggaatggaaaaccaaacatcatatattctcactcatcagtgggagctaagctatgaggatgcaaaggcataagaatgactcagtggactttgaggacttggggaaagggtgggaagggggcgagggataaaagactacaaatagggtgcagtgtacactgctcgggtaatgggtgcaccaaaatctcacaaatcaccactaaagaacttactcatgtaagcaaacaccacctgttccccaataacttgtggaaataaaaaaatttaaaaaaatgtagaaaagattttaaaaaaggatgaggaaatatttacttaataatccattcaacaaatatttattcagaatattctatgtgccagataaaagcagaaaataaaaaaaagacagaaaaactgcagatctgactaccaaatctgatattttgttctatggaaaaaagtaacagcaataaataacaactcaaaatagataaactattcaccaaggcgattaagagaggggtacagtaaaaatacatgaaaattaaaattcaagggaaaaacaaaatttgagggaatttgtcatcagcagacttgccatgcaaaaaatgtgaaaataagttcatcagaagaaggtaaataatataggtcagaaactcaggtctatataagaaaggaagaatgttatagaaagaataaatggtaaaataaaatcttctctgcttcttattcttcaatactctaatagataagtttgttcaaaataataatgtatcttgtgactataatttatgggtgggtgaaatgaataatagtaatgtcataagggaaatgagggaagaattgggaatattttaagaaacttgcactacctgtgaagttgtatagttgtatttgaaattgaacttggattagttgtaaatgtattttgcaaaccccagggcaaccactaagttaaaaaagaaaaagaagaagtctggttaagagacagaaatcgagttgggttttagacacaaactttgagaaacttattaaatatgcaagtatagttggtggggaagatgaagagaaataaggtaagaaaatgaaatgaagcagtcagtaagataggagaaaaaccaagagaggatggtttccagaatgcccatgaagaaagatcctcataaaaggaggttaaaaagtacatttaaaagtatattattagatgttgagtacctataaaacagaatttaaacagtggttgttttggtgtggtggtttttgtgggtgatttaattttttttccattctgtttctaccttttaaaactgtcatgcagtaaatatgcaacactgttgtaataagaaataaaataaaaatcatttttaaagtattgggtcctttactcctacctaagaataaacattctttatttttacctttctactagtgtcaggttctaagtacaatacttagagatacacatattatagggaaatctgttggtaaaaatgtcctagggcacactgttcaatagagatacaataggagatgcatatataattttaaattttctagtatgcacattgaaaaaaatgtgaaattaatattttattaacttagtatatccaatgtattatagtttcaaaaatataaccaatataaaaatattaatgagctatttcacctttttttggatgtctttgaaatcctgtgtgtacttcacacttatagcacatctcaattcatatttaagtgcttgacagttacatgtggctagtatctaccatattggacagtgtgttctagatccttgttcttcaaaatatggttcacagatcagctgcattggcttcacccagaaaaaaataaatgcagaatcttaatccttatcctggagctactatatcagaatctctgtttcttttttttttttttttaacttttaagttcagcggtacaagtacaggtggtttgttacctaggtaaatttgtgtcatggcggtttgttctacagattatttcatcacccaggtattaagcctagtatccattagttatttttcctgattcctttcccttctcccatgctccaccctctgaaaggccccagtgtgtgttgttcccctgtaagtgtccatgtgttctcaccttttagcttccacttataagtgagaacatgtggtatttggttttctgttcttgtgttagtttgccaaagataatggcctcaaaggaatataaattattctactataaaggcacatgcatgagtatgttcattgcagcactattcatgatagccaagacatgaaatcaacctaaatgtccatcagtgagagactggataaagaaaatgtggtacctataaccatagaatactatgcagctgtaaaaaagaatgagatcatgtcctttacagggacatggatggagttggaggccattatccttagcaaactaacacaggaacagaatctgtttctaacaagcactcaaatgatactgttgcagctcgcttcacagaccacactttgagtagcaagactaattatatccagcccaatcattttctagaagctcttcagcagttccttaacctgttttctgctgtaatcctctcttcatgtccatcattcctccaaaaagcaattattatgtgctggttactgcgtgctaatgctttacaagttctatcatccacattttacagaagagaaaacagaagcactaatagattatgtaacttgctcaatatcacccagctagtaattagtggagttgggatttgaaaccaactagcctgcttccagaatccagtgtcttaaccaaccattatttgtttatatatctgtctcttctacttaagatacatctagctcttcaaagatatatagcttatacatcttttttctacaactatttaatacagtaaatgtttttgtaaagaagggagggagggatggcttcatttgtgttttcctgctaggactgcccttccaggtccaattgccccagaatttccagtactcaagatccctgttttataggtgctagtagacatattattgtgtggaagccatggtcagaacacctgccaggtgctatcactgtgtctatcatttcacattaatattaagaaaacatttatgaaattctataatatccaaacagaatttttgctaaaatgttttcctaattaaaaaaaaattagtataaatgataacctaacaggtctgagttttacaagtagaagttttgctaatcagtgaaatgcccataaaggaagtaggagaggagacagtacaaaactgagataattctaagtccaaacaaccactttcttgatatctaggtggtaaattttattgtacatcaattagtgatcctcttttcagattctcttttcattctaatcaatctaattccatttacatttgctcagttaacatgactgctttttggaaagggtccaattcttcttcctttggaaatttcaactctctatttctcatttgactgcaataaagtggctgggatgttcttgagagttatgggtagggaagttctttgtacccttaggtggatgcacgctttggctgtcaacacctagttgcttttcgtaggaggtgctgccaggtcagaaaaaccacttgtatcatagatggccccagtctttgcctcaaataaaacagataccagaaacagggagaagaatctgcccttttctgagaggtacaaagacgaccatggtgtgcatataccctcaccacttaagggctgtgtgccctcgggcaagttactcaggctctctgaacgttatgtttttaactgtgtcaacgtgaactagataaacactatgaatctcaggttccatctgtaatttggcattttgacttatcacctagggtttctgacagcaatgagaaaaatgatggaaaatgtagtgcagagtccagcacctgacaaataataatccattagcattttccttcaatatatttcctactgaactacaggaattttgaggcctcaacttgatattatccctattttaaactttctaatggccagctgcaaacacatccatgtcaactccctccaaaatgttatttgtcctttagatctatttcagatgtatttcttgctgaataatctttgtatgcaatgacccctgtatttacttacaactacatcatcaacatcctaggacagggtctaggttagtttcatttcccttcttgggcatttactacaatgccaggaataaacaggtgcttaataaatgccttttgttaagccaaacgtggtggctcacacctgtaatcccagcactttgggaggcagaggtgggcggatcaccagaggtcgggagtttgagacaagcctgcccaacatgaagaaaccctgtctctactaaaaacacaaaattagctgggcgtggtggcacatgcctgtaatcccagttacttgggaggctgaggcaggagaatcacttgaacctgggaggaggaggttggagtgagccgagatcacgccactgcactccagactgggcaacaagagcgaaactccatttcaaaataaataaataaatgccttttgttgatgctaggcattcctaaagtctttggaaaactttccataaccacccctcctctgcccactccagctctgccctctcacctatctctgcggccctccatcacagaccttattcacttaactgcaaattgggcactgttcctttgtttttattacaaaacatttctaacataccaagaagtaaaacatccgtgatttactctaccactcaatttttcatgaatgttgacattcgttatattattttggttctggtttttaaagatctataaatgtttctgatatagctgtgaaccttccaatcctattctcttcctccctccttggaggcaaccactgtcctgttgtgtccataagtttcatttttgctttactataaaaaaaaggagttacaatacccctcttaaagggttatgaggcttaagcaaaatttatactgtgactgacaaagagttaaaacaatagtagtctctgtcatcctcatcatcaccatcattgttatcctcactcttgaccttattatttttctctgcatattcatatgtctcctccagtaggtctttgcttttctgagatctggaactatttattttctctatatgcctatagcttagcccagttcctgatatataggaagtacacaaaacttgtaaagtaaatacatgctgtaaaggctggactgattaccttccattctctgatttcaggcataatcttaaagcacattaggcatagttcttcaccagttctctaaaatagtaacttgaccagaatatgcaggctaatatccattcaccctcaaaaatccagagtaatgacaatctctttattctttcaaggggccctgatcacctgattgttagtatcacatattcatctccaatacctgacaccagaaaaacaaaaacaaccaggacaaaactaaggttcccaaagtccagaggctgaactaaaagataatggatagatgagcactcagtcttctggcatcctcaataccctctcagccttttagattgttataacccaacttgctgtttccttttcaattatcaagatttacagaataaaaaaaggtgaacttgtctttaaaaattattcgcgataaaattcgattttgtttacttgatgctaaatactgataggcaaggaagtggcaggcaatcttactcggtttcccccatacactaattaaacattttatgcagatatcagcataattaaagaattaggaaacaataagaagtgcttgggataatttgtaatatcagtgcactgatgcattgggtccagataccaggatttgattggcaggactttattaagttttggcagcacttaggtagtctgggagcttttttatgaggctcgtgcacattaatccaagctcctgttgtcgttaatactgatgagtgaaggcagttaattgaattatgtatgaagcactgctgattaaataatatttcactccccactacagaattcgctctgctggattaacatctactgttgtctctgacactgaatgttatacggacctcttctgaagcatacactttgattctttcccatctgttcaactgatgcagcatctcagttgccactggaaccaactatccttcagctctgacatgaggtcactttggagaactgatatagttatttattagcatccgtgtaaccatgaacagaaatcctccccagtgcctcaggtgttctaagggcattattatttaaattcacggtggaatgtgaagaaaaattctaattatttatcattgtattctgcttaaggtgataggaagagaaaataactcaaggtcttccaaatcagccttaaaaataagtattattttgagctgcatatgtgattttgcctaaatttatacacctcctcttctcatgtaatctggagttgaggaaacagaagtctctcccagtggaagatgcactcaagtttctttttctctctcttctacctccctccttcctttgttcttttattgataaattacttttattgataaattactctcttcttttattgataaattactaagtgccagatgctgtgatgggtgctggcatgcagagataaggaaccagtagttactcttttagagtagttcacatcttaaaggcaataaaataggtacatatttaatatcatgtggcatataatatatggcacgtaacagagatacacatgggcagaagggagaatgactaactctacttggagaaatgggaaaaactttgaaactggaggcaacaaatggtgaatcttaaagagtgaatagatattgtccaggttccgactccatcagaaagaaaaagggcacagagtgtattcaattgcatgtagccccatggtccattgaggtacaagagtagggattagattgatacataatccaagagtttttttccccctatgacttggattatttgttgaattgtttccttagacttccaaggataatgatgtattaagaccctacatggtataatgaaaggaacatagatctggcaagagaccaaatttgcacgtgaccttagtcaagtcacgtttcttttctaggctttaattttttcaactctaatataaggagttttgggcaggacacatccgactgaaggtttgcagaagtcctgagagacagtatgaaatgagattggtctgtctttaggagaggtaggctggaaggctaccttggtgaatttactatagttcagtatctggtttctaattttggaagtccagaaacttctcatcaatgctacagagatctggacttgagtatctgatctacacagactaaatttagaataaactatatacatatagaccaatttattgatttatagtaaatactcttgtcagcttgccctaaaatttattaaaaattatagggaaatctacattttaatcaaaagttactcaagtatggacttccagcaaaaagaattgaatgatttaaatattttatgatattagaccctaaaaacacctacctcattatatccatatccatggtagagttttgtctgtcaaggagaatggctttaataagatgggccagaaacccttttctaaaaacagtgttaaagaatcacctctcagactttattttcttctagacttttactactcaccaattttccttttctataggtctttttttctttcctatagtttactacaaaagatgcgtgaatggaactgaatgtgatggcaacccagagatcaacaaataggcgtagccatataagaagaaagagaataaaactgataaaatatcaagattatggttgatacacaaagttatcacagaggagtaaaaccatgtaatatgatttattgctcacatctcaagttataaaatatttggtacaaacaaaacaaccaagagaaataaaataaaacccaacacccagcatttggattattagaaaaatgtcattctttaattaaaattgttaattgcttttatgttgtgcttcacgtactacaaataagttaaaaaaatagggaataagatgcttgaaacacaaatgctgaattttatttatatggggtagcattttttaaaaaaatatgcaaacaatgatttaactaaataattgaaatttggtcattaggagaagacatcattcaaccattgagaaaattttaaaaacctcatcaggccactttaacattttcctgaaagttatattaaatccttacatttggtgacattccctaaataaggggaattgggtctaacaaaaagaggatgtaaacagagaaaagtatagccaaggttaattccaaaatttctgtaatatctgagaaagttatgtgttctttgtgcaaaggttctctgactatccaggcctaaggatgactcaactgagatggttggattttcagaactgaattcctgtgttattcttgctttcaaacttttccagtggctgacttttagcagtggaacctaactgggccagcttttgtgtctcctcacatattacatttcttcttccccaaggagctgtcatttttctccttcttgaaataaattcatctaaagagaatttctctcaatcaacttcccatcattctctctggagtcttcagaactcactattatactgtcaaaagcctgccatccatgcattcactcaaacacaactattgaaagcttaatgataatagtagttactacttaactgaactcctcagatatgccttgtcacctgtactgtgggttcagtaataaataaagcatttttgtccttgaggagctcccagtaaaccaagagaggcaaatatgtaagtagttattcatgtcagaggaagagcaccaatgaggaagcagctcattcaaatggtgaccctcccacattccctattcatggtgtcatcatccatcctgtcctccacacttcacaatcatacccctctcctctttcacctttttatattaaatggtgttttctccttcagaaatagctcatatctcttctgtaatgaactaggtcctccacatctctagcctagacaattacaatcacctctttgccactagtatcttccttccttaaattattattatttttaagcggtgctggttcaaaaatttccatttggtctgacttattcacaaaaacaagttcaatctcctcgacatggcccatggtttaaatcttcccagtgtggccctcttatatttctccagcctaatttcctatctcatatttcaggatacacaaaactttccttaattccctaaacatgccctcttctttaaattatctgtagctcacagcatgtacttttctctacttggtaagaatttcttcctgactccatcttcttcataaaaatgcttattcagttgatcagaaatcatgcccacttggcctttttgacacccaccttgtaaagggctaacagatggctacacccaaccacagcagggtaccccaaatgagagcaaaaacttaccttgtaaataacagctgaggaccccactccagccaaacacaaaacaatcacaggtgataaaaacgtcaccaagagaacttctgtaatatgcacaacaatttcccccagatctaaagatgttaataaatttctgaaaatatctaactttctcacagccaacagatgtaggctaggggttcagagcttctaggtgacagatattagattgtaccttaagcttcatgactttcaatccctctgtctggttggtacctgctcagcctttaagttttggcttatgttcaatgtcctcaagagatctttctagatgttcaatccagattgatccccgctatcatctttctcatagaatctggttcttttccttcatagtacttacgctaatttaccattgtagatctattatttgttggctatatttttctgcacttgttcataagctttgtaatgagtcattcatccatccatacctagcgctgttttgttcatccatgcatacctagcactatcctggcacagagtaagtctcaataagtatgtgtagaataaatataattccattttgcatcatgccaggtgacataaaagtgtaaaaaagtagtagatggtatgttcttagtttggtccatggataatcaattattgatgaaaatctacttctatcagggtagctaaatggtttccaagagttttgtctgtatgaggaacctatggataccttgagacaaagaaggaaaaaagtactttgaaatttgcaatcatgctcagcaaagttcttctcacactctccaggggatggaaaactcatctggaggtagaagagagttaagctgtccaagattctttcatgaaacatgttgatttttgtgtgtgtgtatgtgaggtgaaaagaattttagatgtaacacaatgttgagacaaatgttatctgactcaaactgggagaaatcatatttaaaatagcatggtctaaaaaattaaaagaacagggcaatagtttcagggatcatcaaagaaaactgacaccactgagtaaacatcgcaccagagtcccagtgaaagaagcactcagagtaatggaagaaagtcaacataagctgttgtaacaatgtcagcctcctgtgataaccctaaggtcactttcctagtgggaaccaagagacagaaacatatggggatcatggctatcaagtggcaaactggaaagcagcatattaactgtagtatctgccaaggtaaaagataggtcgccctggacccagcccagtgcagacagacagaggaaggattgggatgctaagttgttccattaggtggggacccaggtcaaagcctatgttctttacagaaccatgtcctttgttcacccaccctagactgctacatactggggatcaaggataaaaatgacttctcatgggagtaaatgaaggaacaatgaaagtagtataataattttgtgcttaattacacattcagactgcaggtgctgtagatagctagtgacaagagaatggccatccagaaaagaatgggatacaagtatttgccctcctgcagttcttcatggagtgtagtcagccaagaataaatttaactttactttcttttaatgcctgtccctgggaatttcttatcccataaaacaccaaccttataaaattagagcaccatccctttttcctcgagtggatttctcttctcattttccttttattaattaaaagataatgctctaaactctggcagtaccccttttcactgtgggctcccctggcccactttctgcagtatatcaacttatttatatttatttgtcctaatacctatgttttcaattggtttctattatgcaacacaccacagggaaagagtctagtattaaaatcacactgtgtagtttaattccactttaatgctaggactctggttttaatcaacttattttgatcacagaataattctcagtaataatccaggggtgtcaggcaggccatcagctgagagtaatcaaatgagtctctccacctcttctctctctcttccatatagaatagtgcatttcttccacttcacataaactggagctaaagccaggttccaaattagtctcgtgaaattgtaactgactctctattaccaacttgtaatgggaattaatggagtgaataatctaaaatcatgggtggttctgaattaatgatacttgtcttgagtaacacaatatatgctttttccctccaaaagatgtacatttcttattaatgatgttttcttgatctctaagtagacatcaagaaaaagaagatagtactttttagaatgccaagcaagcgttgtttggggtactttgtaaacactgtcttgtgcaatcactccatgaggaaggtattcttctagtttatggagtaggaagttcagagcagcagaggattgtgggaaaacctctgggctaagagttagggaaaacagttctagatcatcacacaggtattgaaaatgaaggatatgtgttgcggcaatgtagctaagttggaattttgtttttaaaatgttcttttgctgcagttccgagttagtgtgggccacaagagacattttgtgtgggactggaaggcagaagtaaggtgtcagccatgttctttttatgtgggcaagattggtgttgagtatgaggcactggtgtagtgcacaagccttgtcacttttctgccagcctgagttgtgagtgtggggcagtgactgggcctgcagcaccttcagttcctgctggacatcctctgtgtgttcatatctgtgaagaaggatgccagctcttcctgcagatcattccatcatcaaagttgaaagctgggtatggtgagagactgatgtatgtttcagctgtccttataggttccagcctgtccattctgtccttgtttccctgacttcacatctgtcttttcttctctactgctttacatgtgggcttcaggctctagcaccaagacacagaagcagtagcttcatatagactgtttatccagcacccacaattgcgtaacatccaatccttggaataattctttactctttacagctcctatcaggtctgcttctcggatcaaactctgacaatgagcaatcctaggaaatcattcctctcctcacgtaactgtttcttaatcaataattagtccctctggctctatggtgaaaatgaagcatgacacagaattgtgctaagggttttttctttctgttcagataattcacaaaataggcaatttgcattttaataatcataagctaaattaacaggtgatgctgttgtgaaggtaagaatcactattgggaattatatcttggacttcatgatgtgagcaacattttaaggaagtcctcaagccctgggccactgatgtgacgaagcctgtgatgaagatgaaggttgagagcaagacctatggtttctgaatatcctggtttcatgcaggtgtagtgaaagcaataaatccacacatgagtttaacaccttgtttctttcaagtgctttcacagatagtggccacacttgtcaaaatgcttgccttataaacttgctgtgagaaacacattgataatggatctggagacctcaagatgaagctaggcacacagtcatgaattaatggtaattactatgctttacttttgtatgtctctttgactttcgctagctctcttcagtggatcttcagagtaatcttgaaatgctgttaacacccacttaagaggaaataagcacagagtataaaaatggcttgcttgaaggtcatatggctggcaagtggtacaacaaggaccaataatcaaattcactgaaataatgatagagctgataagtatggaacatataagcatgtgtcagatattgcctatgcatatcagttcatttaatcctcacaaataaacctatgagggtaataatagtatcccttttttatagattagggaactgaggttcaaatattaagagaggttaagttatctctatgttgtatcaagttaaacggtaatgaggattaaaatctcgactacagatgatcaagtggctggggggtgggggtgggtatagtgttctaagcctcagcttattaacaatgaaacagtacagtacttatctcaaactgttattctgaggactaaccaagctaagataagtaagctgctgataccatgcctgacatgtactgagcactctttttgttgttaattgtctcactagggcttagtctacgaagacctggtgcctttattgcttaaccagggattagttcactatggtccatgggtcaaatccagcctgaggcctgtttctgtgtggcctatgaggtaagaatgtttttaaattttcaaaggattgtaaaaaacaaagcagaatatgcaacagaggcctgtgtggcttgcaaaccctaaaatcttcactatctggtcttttatagaaaaagtttgccaaaccatagactatccatgctgttttttcaaccttgtgatgcagaactaaaagagacagaaagcctatattgatttagtctaaaaatgcagagctcaacttagagatcttggaagatagaggagtgaatgaaagaagtagaagaaaactgtgtttggtgtttttcagtgaagtgaataagactacatgagatagtagatattctctgccgttgctgttgcacctttctgtaagcaattaaagtataagtaactatagggaagttttttttttaataggggatattgctccctgtcatgccacgtaatctcttaccatttttaggagacattctagtaaagattattataaatttttgaaagtggatttgtgttttctttagggtgctgcactgtatagaaataggccatgaggcagcccaactttattagggttagatatgtatcttctcaaaactatcctgcctgaagcagattttaagtttctaccattcacatctttctatgataaaaatgggtgtttgggagacagcatttatcttcatgaaaaatacacataataatgttacagcgaagtcattgtgctggagagctcagggcagccttccatttggctgaccctgaaggcaacagttaccctgaggttcaaggctactagcctcctttctaggtcaaaaataaggaggggcaagaagcacttaagacagataacctgatagccactctgagatttatcctggttttaacaaaaatatgttaggaagagagtaaagagcccacacatattaaagcaaacaagtgcttccaagactcccatgaaactttaattaatggcacatgtatacatatgtaacaaacctgtacattgtgcacatgtaccctataacttaaagtataatttaaaaaaaagaaaagttataaatgaaaaaaaaaataaaaaacatgaatctcctggaaatgtttcttggttggcccactgcagaggtaaggtgtgtgagaaagacaagcagtgatctgtatcagggagagaggggaggccagagggcatgtgagccaagcctacaaattcatacagggccataaaaagtgcaggtgactctgggactacatacaggaggtgctactgcaaagaagtgaccagcctggggtcatcgaacagagaatgtagaggaggcaagatggataattatggagtcaaagaaaaaaagtccaatgtctaaaccaatggtgagacttcagggggttctttaaatggatgcctgcacaaaaataaataatgagcatgcactatatctacacttatttatggattattttcaatgaataattttattttattcttaaaattcatgtagggagaaggaatcaagttctccatttcagaaattagaaaagtttcaaaaagggaaaggaagtatatccattaagctcctctgatggacattcagggactccgtagacatttccacattccctcatataagcatcgcaagaagccagtttgcttattaccatgtatttaggtgttattgttgtcttttaacatatgaaaaagttgtgactgagaagtttagtcgagatcccacacaattagcaagctctaaagttggaatttgagccctatgtctggctataaccttgacctctttccattatacaatccttccttctctatgtaggattatcctaccttcagaaataaggagacaaaggtttgcacaggaatgaggtttgctgtctccaagtctcttgttctttctagagatcaagctgcttccacttttttcctcaggttatacgatgggcctgtcaacagattgatctccttattgatccctgaatatagtcccattaacctgtggaccactgtacatgttgctccccttgccacagataacctgacctgttatttacatttttcaagtcaaacttgagcatcagctcctcctggaagtcttccctcacccctttttcactgtgacaaccatcatggctccccacggatgccctccagtttataaagatgcctgtcctgtgggttcccataataccttatcatctccctacaagcaaataccacagtacattgtaagagccagattgcatatgtatttcttttattttaccatatattctttgaaggcaggggctgtgctcactgtttccccgggctccagcatggtccctgactactggtggtaagttagtatctgttaaaagaatgagtagatgaaagctttgtttacctttttaataatttttaggctacaattttgaatagtagatcaaagaaatacaaacaggaatgttcattattttattatttatccaatgatactggagtaggagaagcttcagacagagggatttgatatggaacttgcaactcaggtaggaaacaaaagttcacacaaaagggaaatggatacacttagttgcaatgactttaaggaaaaggcagagaaagagacctcccacctgtcctgttgacttttatcagcttttactttgttttgatactgagctaatcaaattagtatctatttccacttctatgtgcaaaaaagcttatttctaagggattaaaacatttcctaaaaatattcagaatagatacttatagtaaaaactaaaacaaaaaaaaaaaaacccttaacacaacacataataagtatctgtctcttatgaggacaaccaccaaaaataacatgcacatcccaaagggctgcttcctcgttacattaatacatcaaaatatctacttatgatgattgatttgtagatgttgatgctgaaaacccatttatcatttgcactgcaatttgcccatctttacagatcataaaaattcattgaattatgcttcttcttatactataatttaatatcttgttttcagcaccagaataaatccccataagtaataatttccctatgttaccctttagcagtcagtcccaatcaatgcattttatatacacacatgcatatgaaaagttaatgaaacaagtttctcacttcataatttcttaactggaacccaaaccaaaagacacagagagaagtacctacctatttaggaatcagaacaacaaaattacccagttaataagaaagtcagctgcatatttctaaaataagtataacatcttgctcattccaccaaaactgtaatttataaccaacactgtggaaaagacacatgtatgtattttcttagaagttcacagtagagatttttagtacagccattctacgccttagacactaacaagacaattaataaaatgatgtaacactggagatctggaataaatgtatgacttttgcattattagtacacatgacattatcttaccttattttcacatcatttctacaaaatgctctaagtattttaataattaatatgtactttttcaatcttttagagaaagtgaggcatggagaagttcagataatgcctcaaaaatatgaatgagatagtgaaaacgcaaaatgaaaataagataacagaccaatcccatcctctaatgcaaaactctctatttttattgtaaaattatgaaaatccccaattatttttagcctctgaagaaatttgctaattgttctcagacatccaaagctaggtcaagaacaagactctttttccccctcaagtcataaacttgtctaaaataaagtaaaacaaagacttaagaaataagaccctcaagtactaaagtgcttttgaacttcaatcgtatattagcaagttattctgaagtatataaccaagatcctggatctccaaaaatctcaagttgtgaatacctctatagcacatcatttctcccataaaatgtaggaaaatacaaaataataattcagtgaaccctttaggaccttaatgattctacaaatacattaataaaatcatttaaaaatctataaaaataaattctgcttcccaaataaacacaacaccccattatgcttccacattactgttgtgacattattgtgaagttactggaatctttaaagaaacttttaatctccattaattattgatctctaaacaatgaataatggatgacttccaaagcttattgagatgaagaaggtgggcagtccacctgggctactccctggccaaagagattggccagatcacactgtgtgtttccagtctatgcctcagtggtattatactcatcacacaatatgactctttagggtactttgtcaataggaaacaccatgagtgttgcatactgcctggaagagctccctttaactggtttggagaacagctgtcaaagccatttcatggattgacaattctttaccagactttcatggtccaggggagctattggggttttgtctgctatgttgatgtaatgataaacttttcaaaaagatccttttacatcctcacaaattctgtttcagagaactttctctaaaatgtattgatctcttggctctattgacttataataattagtcatatgataaacaaccagcggctggagaatggtgggccataaaccagatttgctttcaacatctggtcatggaaggagaagagtgacacttgaagaggtaagaaaggtgagggtgagctgacttaaaggttcaaagcaaaaagatgaaaaaaagactgcctttatgtataaaaatttccatcacacagagagcgtcctttgttcttaggggtgatgccatattgcaacttttatcccatgtaattggtaaggtaatgagatggccaaagagagatgatgctgaaggcacatactataaaatcgctgatgaacagagaccacagattttggtctctgtctctgtacaaggaagtagcacctgatattatttctattgactgctccagtattacactagcagttcctacagaaggaagtatgaactcatgatgggcagattactctattctgtccctttgttcccaactagctatactgaaaaaagaaaatggggtagaaaattataaaatatttaaataaaattggggctaaatatggggctaaaattataaaatatcacaataaaaatttcataaaatttggaatattaaaatgctaatgccatgtgcttctactcagatttagcaaatgttaacacttaccattctttcaacaaatctctctttgtgagaaaaaggcaaatgtagtggaagatcaattttcatcacttttaagcatttttttccctctttccctagaggtaatcaaggtcccaaagctgttttatatcctttctgattgttgtttgtatatttttatcacctatctgcatctccacataacacatagcatttgagttttaaaaagttttacataaatgtaatcatatagtatttatgctgcaatttgctttttcacacaagattggttgagatttttcagtgttgataaggaaaaatctagctcattcaagttcaataatatattcctgtataaatacatcttctaaaaaatgtcattgtgattcttggaccctcttggaattttaattagaatattactaagttgattaatctgagattaatgtcttcattatattaactttagccagtcgtgcacattgtgattctttctctttcatccaatcttttagatccttgaattgcacgttataattttttgattgttgttaaagccattttacacatattatgtacatagttagaggttccttgtagtcattattatcaatggaaatttttttcctattatattctctattttgttatggctgatatgtaaaaacactctcaagtttttatattgatctgatgtgcaataaaccttttaaacacccttctaacagtttggctggaaattcattttcaaatatctatataatcatatcatattcaaatagtgacaattttttttcttcttttccaatcaacctatagtttatattcttctcttttctttccagtaacaaatttaagtgctagcagtagccttgaatatcttatatcttactaaatacctgtctttaatggaaaaatttcttacatttcatccataagtaaggtgtttgctagaatgttggtggatactcttcaatagattaagagtatttgatccttaggtcgataagaatttttattatgaataatgctaaaatttagaaatattttttcctacttctattgaagtgattgtgtgattgttttctttaatcaatgtacagaattatactgagagatttttatgaatttttatgatagtggcctatggtcatattcctggaagaaaaagacttaaaaaatagttcaatgtatttataatactctgttggatttaatttgctgatgttttatttacaattttgtatatatgatcacacatgagaatagcttatacttttttttcctcttctgtttttatctcctcttgatgttaagactatattagcctcataaaatgaattgggtagcattctttatttttctattctctgaaacagtttggactatatatgtaccatcacttactcataaatccatttatacctatagttttctaagaaagacattttataatagctactggttcgttttggtttcaaactaagttttcaagcaactttaataatttaatttattaagaaaactatccatctcttaatattttaaatatttggtgtaataaaatgactgatcaaaatagtaccatagttttatctttccactgtatctacagttgcattattttttcattactcattcagtctctcttttttcttaatcagtcttgctaatttattctttaatacaatcagttttatttttcaaagggccagttttacttgtattgatcatctcttctttgttttctatttcattattgcttctttccagaggattcctttgcaaacaaagttctaaaccatttgaggaaaactattacaaagaaagtcgataaaatcaacaattaagatttgactatactccaaatagaataaagatcatagaggaaactgaaagtaaattttaagtgagatggttcagaatacatgcctagataaaaacataagaactatttttattgagaagataacgtattagacaacaatcactagggaatggggtgcgtaaagtatttaatgtataattgtcttttggagggaacagcataggaaaactaaataatttacatattggttaagtatgttaatttaatggagtactctgctagagcttttctaatttcaattttttgtttttttctattactgctatgtgtttgaatcagaagaagggcaatgtcatcttgacaacttacatattgtaagttatagatcctccagtatctttcttttacttaggaaactttgaaagataacctcagtctcaagtgtcatgtagatcttagatacataaagttctttgaacttgctcaattaaaaaaatggaactgaaacatgaatgtattgggcttcctatccaagcttattttttgatcctgcttttgaatacctttccctctttccaaacagaagagctgatgctgctcttgagggcttggcatttttctgcctttctttgtttaaggtttcacctttccctcagttcctcacctaaatactagaccatgagcttctagaggataggaagtgcttcttatctttttgactttggtgcctagtacattgcctggcacagagtactgaagagttatttctctaatagttacaagtgcttccttttgccatttatcttagtctatctcatctctatagatatgaacatagcccttaaagacactacaagtctaaatctcactccttcaagagtcagcctccctctattgtaaagcttttctttatagtgacaactggaaataattcaattttgaaagtttttttttaacgtgtctcttttatgccacttattgttttctataccataagacagtgatttatggacatagattttcttttttacaggactgtaaaccctctaagaccaggatccatctaatttttgttctatacaaagcaaaacaatttataaatatttgatgaataaatactttataacataaaggaaatgatcatgtttgaatttttcacttgtttgccttttaattaatcattattttcaccaggccagtaagaagattgctgaactatggtgctgatgtgtcacctggagagcagatgtcctatgggcatgaaatgttgccttacttccttttaacaagaatcaacccctcaacgttggctttgtagcaaggctacataaaattaccaggcttttagaatacctctaaagcaaaggtcaattataatttgttggataatttctcttctaaatttataattctgagatgtttaattttagagtgataaaaattatgattcaaaactcacattttaaatcagaatgagcaaattcaacaaaaacaaagataaacagatgggacttaattaaactaaaaagcttctgcacagcaaaagaaataaatcagcagagttaatagacaacccacagagtgggagaaaatcttcacaatctatatatccaacaaaggacgagtatccaaaatctaaaaagaactcaaatcagcaagaaaaaataaagcaatcctatcaaaaagtgggctaaggacatgaatagactattctcaaaatcagatatataaatggccaagaagcatatggaaaaatgctccacatcactaaatatcagggaaatacaaatcaaaaccacaatgcaataccaccccactcctgctagaatggccataataaaaaaattaaaaaataatagatgttggcatggatgctgtgaaaagggaacacttttacaccgttggtgggaatgtaaacttgtacaaccactatggaaaacagtgtggcgattacttaaagaactaaaagtagatctactgtttaatccatcaatcccacttctcggtatctacctagaggaaaagagttattatagaaaaaagatacttgtgcacacatgtttacagcagcacaatttgcaattgcaaaaatatggaactaacccaaatgcccatcaatcaatgagtggataaagaaaatgtgctgtgtgtgtgtatgtgtatgtacatacacatacaccatggaatactactcagccataaaaaggaattaaataatggcattcacagcaacctggatggaagtggagattatcaatctaaggggagtaacctaggaaaggaaaaccaaacatagtatgttctcactcatttgtgagaactaacctatgaggacacaaaggcatagaagatacattggactttggggactgggggaaaatgtgggggatggtgagggataaaagactgcacattgggtacagtttacactacttgggtgatgggtacaccaaaatcccagaaatcaccactaaataacttaaagaatgcctgggattttttatattttgttcaacatgaacttattaatattatttatattagaaaaatgcatgttagtgctgtttcagttagactcagaaaagctgatgtaatccaatcaaaaacttaaatccattctatcagtagatgtatcattaaggtttaaattcaatgagcagggaatgaagtcaagtttcagcaaatttactgtagaaaatgatgataagaagtgtgcaaagtggaatgctacaaacacacaagcagttggcgggggcgggggagggggcacagagacgggatcctgtcctgagtcagctaattaccaacctggggaagttacttagcccttctgagccttactttctatgcctaaaaactgggaattgtattgtggatttgaagaatgtttgttaagaatactgaaatgtatgtacatatgctcctaataccatatttggagcctatcatttatgttataatttatgatcctttatcataatcatttattattatgaggatgatgatgaaaattttccatagtcagcaatcctgggcttcatagccctatgatcagacttgcaaattagaacttgagtttctgctgcgatcaggtaaatgaagtttgtcctgagggtcatgatcatgacagtatgctctggtgcaaataattagggcaatttaaaaaattacattctcaatggtttgggcattaatcttttctaaataatcataataaagtggaatagtccatcttaagaagaagttatagccaaataattttgttcaattatattaaccaatatataaaacatgagatgctttattaaagcaaatgagaaaaaaaatctactttgccaaaagaacatttggatttttttctttactatataccaatgctctgtaacatgggagagctatttcctactttataatgaaaatgtatgtgaaatacacatgcaagacaaggacggcatgtatgataagtgatatgacccaggaagaactacaggagatcatgatacaaacaagggtctatgaactggtggggaagagagagtcataaagaagacagggaccagaaatacatgctaatggagaaatgacttcagcatcatagaagaaataagtaaaaactcagaaatgagaattgtttttcccaggtaactagtctcaagggtatggtggtgaacacagttgtgttttaatgcaatccacagaaaaaatggcagaatagtctgtgaagccaaacagcagtgaaggtgagtgcaaatctgggatgaataagggagggattagccaaggagaccttccacctgggaccccaatatgccatgaactgagctggttatggtagcttgccatttattaggtttaatattaatactaagcaatttactacaatgtctcataatctttacaatgattttgtaatgattatcttgatattacagatgaagaaactgaggggaaaaagatgttaacttttgctgattctttcaaaatctctaattcttacaacaaccttagttcagcattattaaccttattttcaggtaagaaactgaaatttggagacactgagtcacttaacaatggccacacagctgataggtaggagaatcaaagaatgaatatggatctgtgagaaaacacagaatcacatacatgcatctatgaggacttgaggtaacacactgtctcctattatttgaaatggtagaagctgagtctaggtcacatggttatggaatatctattatatgcaaaggtcaaagtttatagaattttagaggtgaaagggcccttagatatcttttattgcaatatgcttactttatacataaggaaatactccaagaaatgtaaatggttcaaagttaaactatgttcagtacgttcagtgattattaatataaagaatggaatcatacacacagaagattctgccccacctacatgggtaattttgtgatgccaaatttaacattttctaattaattgtctacaatttttcaatatcaaataattctctttgtaaaagtagaaaactggagaatgataagtttgaacataaaaaaggaaatggaaatgtgttaattataaaaaaaaaaatgtcctattttaaagttaggtggctgttagcattttttttctgctcaggcttgaccctgagagggcttcctctgctgtagatagggagttaggaaaactattcctatctaaaaatgaaaataccaatgtagcttacttgctggccaaggtgtacatatagacatcaatgtcatgtaacaaattttaacttaaatcctgcaatgagtataagaaaatcctaaattgataaagcaaccattctctgggaaccaggaaaagcaaaaacaaaattgctctatagaaatacttttacaaccatcctcacaaggaacttccacagaaaaagagatatccattgaataacagattcctaaccaaaattagaaacaacaggaggaaataaatcaatgtaggagtagtcagaagctaaaattaaattgataatgtatgctgtaagaatcaaaaataatatatactcttgaaaaagacaacatatttataataaaaatgtaacagaagagatagaaatcacaatcataatgaaagaacaagacctcctatgggaaaaagaaaaatcagatttaaaaagaaaccagaatagactgataaaaatgaaaattataagaataaaattaaaatgcagtgggtgtattaaacaacagctatgattagctaaagagggcattagggaattggaaaacagatgtgaagaagccacatagaattcaacacacagaaacatatagaaaaatttaaaagatgaagagatatggaacatagaaagaaatagattaccatccaagaaacaacttgttagagtatatacttgtggcttgttagtcttcccttatgtcttcgatgatggtatttaattgacttcctgttttgtttttgtgatgtctgagttacttacatattcagaagtagattacagtcatcccacattatccacaggggactggtttcagaaccccactctgataccaaaatctgtagttgctcaagtcctttatataaaataacgtagtatagttgaccctccatagccatagtttccccattcatggagcgcttactgtgctacactgatccaattttgattctgttaattcgtgtaagcatagtacaagtttaactatttattaagtgaatataaatagaactctaggaaactagaggaagcaaagataaatcatgacaaacaaaaatatgatagaaagtggtggaagtatgaccaaatataccagtaatcaggatgaaaattggaattaaacttccatattaaaaataatatcaggtaccatttaaaaataaccttataatgaaaaattataaattcatatgaatttatgaatgaaaaattataaattcttatgaaagaggaaagcaccaagacaagtgtagaaatataaggaatgatgactaatcatgccagctgacatcaggacccatacaagtataagttatagacaactagaccagtggcagaagggaaagcctagaatcacatgcattatgtgcaaagttggaatacgaagaacgtggcattaaaattaatatggacttaagaataggctatttaacaaattttggtaattcaactggctgtgggaaataattggatccctacttcatattaatacaattcaagaatttcatacagataaaataccaaaatgtgaaaagaaaagttataaaatttagagagaagtataatatttttataatcttagcacagaggaggattaaggaaataaggtacaaaatctatcagctatcatggaaaagttagttaagtagataaatgtgacatattaacattttaaatcgtctgtataagcaaagttaaatgcctgagactgggagaagatatttgctgggcacataagtgatataatattagtatccagaactctgtcactttgataaaaaaataggcaaataatataaactaaaaactcacagtagaagatacccaagcaagtaactagatgctcattttcacttgtgattcagagaaatgcgtatttgaaaaacaaagatatctattcacatcagcaaaatcttgcaattaattgggcaaatatgtcaaagaagaaaatggatgaataattgtggtacatttatacaatataatccttaagatcaaataaataaactatacctacatatatgaacatgaatatatttcaaaatataattaaaaaagcagtttgcaaaggacacatatagtatgtgcaataattatgaacacatgtatgtaccaagagtaaaaggtgatgtactaacgtcagtgtagtgatcccttctagtgaccaagaaaacacagaacacaaaaaacaaacaacaaactggaatgaagaagtatatagacgtataatgacactttttctaagaacaaaacctctgagacaatacttgattattttttgttgctgccatttgtctttggaactgacatcatgccggggttgggtcatgaagctgatgacttgatgtaagttgcatggatgttgttagtttcctcttcaattgccttttagctccttaaaagcaaatggaatttgtccccaatagtatattttcaatgactgatacaatttataaaatgtgagttgtcaacaaggagcatgatgaggagaacactgaaaatatgaacaaatcctaagaaagttaatagctagatcttgaatgaacttgagaggaagttatccaaattgaaaactaaggcttaaggaggaaggcaattgccagaggccaagtgactgatgagaagtaaggatttacaagccacaggtctccagctatttcttctaagcctgtggtacataaagttctttgtgtcagagacttccttgagagtctgaaggaagcttaaagtctcaatttcaccatttcttcaagaaatgagcacatatttgcaaaatttgcatataatttctgaagcctaaggtctgaaaccttacctaagaacatccactgttaagaatttctgtggacaagtcctaggctacatgttgttggcataggatctaattgggaatgctgctttttatttaaacaaatcagatattctttcaggtcaaccacgttggatgtggggaggatcatttttagaatgggagctcctcagagatggtagtttccaggtgagtggaagtagacatcagagttccaggtgagtagaggtagacattggagtctacttctgctcaccttggagtagacattggagaagggtgggatggatggaaaaggagaatcctttgggagaggcattggagtttgctgccatagcttgatctaagagctttgacaggctggggctttcagacaccaggattcaaagcagctcagagcatctccatgcaaagcatccagagtgctttgtagccatcctttcccataatacaggcaatctttctgttcttaattgcacaatttgtcctaagaaattagaagaaacaaagaaaagccttacaactacatgagagagattaactttttaaggaaggaccacacccaccatttcattaactctatatttccagtgcattgcagattgctgggaatttcaatcaccactcggtaaatgtattcattgcattgattgcaaaaagctaatttgatttgctttggatgtttctcctcctccaaatctcatgttgaaatgtgacctccaatgttggggtctagtgggaggtgtttgagtcatgggggtggatcctcataaatgtcttggtactgtcctcaaggtaatgagtgagttctcactctgagtgcatgtgagacctgactgtttaaaagaccctggggccagatgtggtggctcaaacttgtaatctcagaactttgagaggctgaggtggatagatcactttaggtcagaggttcaagactagcctggctaacatagtgaaaccctgtctctactaaaaatacaaaaattatccaagtgtggtggcacatgcctgtaatcccagctactcaggaggctgaggtgggagacttgcttgaaaccagtaggtggaggttgcagtgagccgatactgtgccactgccctccagcctaggtgatagaatgaggctccatctcaaaataaataaattaattaaaataaaataacctggcactttcttccttgctctcttgctccctttctcaccatttgaccagcttctcctttgtcttccaacatgattggaagattcttgaggctctcgctagaagcagatgctggtgagatgctttctgtacattccgcagaactgtgagcaaaataaacctcttttctttataaattacccaatttcaaatattcctttatagccatgcaaagcagactaccacagaaaattcatactgtggtatggagcactgctataaagatacctgaaaatgtggaagcagctttgggacttggtaactgacaaatgttggaagagtttgaatgtctcagaggaaggcaggaagaaagatgaaggaaagtttggaaattcctagagacttgttaagtggttgtgaccaaaatgctgatagaaacattggcagtgaaggccaggctaattaagtctcatatgaaaatgaggaagttattgggatctggaataaagtttacccatgttgtgtgctagcaaataacttagctgcactgtgtccatgtcctagggatccgtggaagtttgaacttaagagggatgacttagggtatctggtagaagaaaatttctaagcagtagtattgaagatgtggcatggctgcttctaacagcctacagttaattagacgcacatgcaaaggcataacttaaagtttgaatttacaataaaaaggactgcagggtgtaaaaatctggaaaatttacagcctggccacatagtagagaaggaaagaccattttcaggagaatagaccaagcaggctgtggagcaaccacttgctagagacattcacatgactaaatggtagtcatgcactcgtagccaagacaacgggataaagacctcaaaggcatttcacaagtttctgaggcaggtctcccaccacaggcccagaggcttggaaaggaagaatggtttcatgagccagaactggggcattgctccccacttcctggctgcggctcaaggcatcccaggtacaactccagccagatgcttcagatagcacaagttgtaagccttttcagcttccacatagtgcaaagcctttaggccctcagaacccaagagtgaaggaggcttggcagcttccacccagatttcagaggatgtatgggaaagcctgggtactcagacagaagcctgcttcagaggaagagccctcagaaagagcctttgctagggcagtatagaggggaagtgtggggttggagcccccatacaaagtccccaccagcacactgcctagtggagctgtaggaagggtcatgctgcccttcagaccaaataatggtagagccactgacagcttatgccctcagtctgaaaaagccacaggcaatagactccaacctgtgagagcagccgtgggggctgtaccctgcaaagccatagggacaggccagcccaaagtcttaggaggccatccctcatacccatgttcccaggatgcaagaagcagagccaaaggagattatggtggagatttaagatttaatgtctgctctgctgtgtttcagacttgcatggggcttgttactcctctcttttggccaatttatcccttttgaaatagaaatgtttactcaatgcctgtaccaccattatatctaggaaataaataacttatttttgatttgacaatctcgtaggtagaagaagcttgccttgagtgtcagatgagactttagacttttgagtgatgctggaatgagttaagattttggaggactattgggaaaggatgattgtattttggaatgtgagatgaacatgaaatttggaggaccagggaagaagtaatatggtatggatattttgccatttccaaatctcatgttcaaatgtgacttccagtattacaggtggacctagtgggaggtgtttgggtcacgggggtagatccctcatgaatggcttggtgctgtccccatgataatgagtgagttctcactctatgagttcacatgatatctggttgtttaaaagagaccgacactccttcctctatctcttgcttgctctctcaccatgtgacatgcttgctcccactttccttccaccatgattggaagcttctgggggccatcaccacaaggagattctaatgccatgcttcctgtacacccagcagagctatgagacaaataaacctcttttctttataaattacaaaattccaggtgttcctttatagcagcacaaaacagacacacataattctaggttctttttacaaacaccaagattcagacattttagtggtttaaaattagggtaaagagtctcattgccattattctctttaatgaacaaaacgttagttgtgaaattatatattttaatgaaatatagtgtagccatttacattaatttgtacattgtaaacatgttaatgtttctctgtattgtctcttccaccaaaaatgttatctttgactgattcaccctctccgaatactgggagagaagggttattttggtttggttttaatttgtcaatcccacaagcagttttcagcagatagaaggtatttggagattttcttacatgaaacaatccaagcatacactttataattttttttactatgtttaaattgatgtatacaacacatgcagaaaagtacacagatgataagtatataatctgattcatttctacaaagtaaatacatctatgtgtttgccaccaaaaatctaggtcctacactaaaaaatagaacattaccagcatcccagaagccccagatcaaagtaggcatatgcaagaaatattttgtaatttccaatgtaattgcttctttgatccatgggttatttagaaatacgttgcctaattttccaacatttgggaatacatttgggaatttcctagttacattcctgttatttacttacagtgtaatatcactgtgaagagatatatatacatatatatatgtatatgtatatatacaatctgctttgtgttttctggattaaaaaaagtttgttatatcagttgttgagaattgttacagtctcctactataattatagattgctctattcttcacttagttttgtcaatttttgctttactgaaattaagtctatgatttaaggtgaatacaaatttagaactgttatatctttttagtggattgacccttttatcattataaaatatcctgtttaccgctggtaatattttttgccttaaatctacattacctcatattaaacaatttggatgatatattttcagatatttttggcatttcctgaacaatgcaagcttcttagaagcttcaaatccaatgataccctctccatattttatatcattgttttgggggggtggtattttaattctgcataaattttaaactcaaaacaatattagtagcatcatattttaatatcactttatagggtcaatattaatttatatgtctactttttcctcattactttctgaattttcttgcttcaatctaggatcatttttctttgcctaaagaattcacttgtattttgttttctgcaaatccgtcattttttgtctaaaaatgtctttattttgtctttacactgaaaggataattttacttggtatagaatttcaaaattgctgtaatttgctttaattcttaaaaaatgtcactccatttattctgccttccataacttttattcaacttctattttagattcagggggtacataagtaggtttgttacatggatatattgcatgatgctgatgtttggggcatgattgattccatcacccaggtagtaaacatagtacccaataaatagtttttcaacccttgccccatccttctttaccccctccagtgtccctagttctattgttgccatctttatgcccatgtgtacctaatgtttagctaccatgtatgtgtacatgtagtatttgggtttctgcttttgtgttagtttgcttagtataatggcctccagcatcactcattgttgctgcaaaagacaggattttgttctttttttattggtgtagagttttacatggtttgtatgtaccacattttatttatccagtctaccattgatgggtatcgaggttgattccatataacaaacctactcatgtaccccctgaatctaaaataaaagttgaataaaagttatggaaggcagaataaatggaatggcattttttaagaattaaagcgaatcacagaaattttgaaattctacaccaatcatgggcattgaggttgattccatgtctttgccattttgaataccactccaatgaacatctgagtataggtttctttttgggaaaaatgatttattttcctttggagatatacccagcaatgggattgcttggttgaatagtagttccatctttagtcctttgagaaatcttcaaactgctttccacagtagttgaactaatttatattcccaccaacagtgtataagcattctcttatctctgcagccttgccaatatctgttatttttctttttttaatagccattctgacttgagatgatatctcattgtaactttgatttgcatttctctgataattagtaatgttgtatgtcttcttttcagaactgaacaaaataaagatctatacaggaaaaccaaagtttattttttgtaaggataaaaaagatcaatagactactagctagattaacaaaggaaaaaagggagaagattcaaataagcactatcagaaacaacaaagatgacattacaaccaatcccacagaaacacaaaagttactcagagattattatgaacacctctatgcacacaaacagaaaatctagagaaaatggataaattcccaggaatgcacaaccttcaaatattcaatcaggaagaaatagaaaccctgaacagaacaataacatgtgccagaattgaatcagtcattttaaaagactaccaaccaaaaaaggcccaggaccaggtggattcacagccaaattctaccagacatatgaagaagagctggtaccaatccttactgaaactattctagaaaataaaggaggaggactgcttctcagccctttggctaagatcaagtgaaaatcaaggaggagagactcctccctaattcatttgatgaaatcagcatcagctcaacattaaagcccagcaaagacatgataaaaaaagaaaactacaaactactatccctgaagaacacagatatgaaaatcctcaacaaatactagcaagctgaaatccagcatcacatcaaagtgttaattcaccacaatcaagcaggtgttattcctgggatgcaaggttggttcaacatccataaatcagtaaatgtgattcacgacatgaacagaattaaaaacataaatcatatgatcatcttgatagacacagaaagatttcagtaaaatccaacatcccttcatgataaaaaccctcaacaaagtaggcattgaaggaatgtatctcaaaattattggcaccatctgtgacaaacccacagccaacaccataatgagtgggtgaaagctagaacaattcccctattctccttaataactagaacaagacaaggatgccattctaaccactcctattctactgagtactagaactcctagccagacaaatcaggcaagagaaagaaataaaatgcatccaaataggaaaaaaagtcaaattatctttctttgctgatgacatgattttatatctagacaaccctaaagactccatttaaaggctcctaaaactgataaacaacttcaataaagtttcaagatacaaaataaaagtacaaaaatcagtactatttctatacactgataatattcaacctgagagccaaattaagaacaaaatcctatttacaatagcaacaacaacaaaaaaatacctaggaatacatctagccaagggggtgaaaattttctgcaaggagaactaccaaacactgctgaaagaaatcaaagatgacacaaacaaatggagaaacattccatgctcatatattggaagaatcaatatcattaaaatgaatatactgcccaaagcaatctacagatttgatgttattccttgcaaactgccaatgtcttttttcacagaattggaaatatcaatcctaaaattcatatggaacttgaaaagagcccaaatggctaaacgatcctaagcaaaaataaaagtcagacttcatcacattacccaacttcaaactatataacaaggctacagtaaccaaaacagcaatggtaccagtataaaaacaggctcatacaccaatggaacaaaatagagagcccagaaataaacccatatccctacaaccaatcaaccaaccaactgatctttgacaaagtcaacaaaaataagcaatgaggaaaggactttctattcaataaatggtgctgggataactggctgtgcatatgcagaatgaaactaaacctctatctttcactgtaaacaaaaataaactcaagatggattaaagatttaaatgtaagacctaaaactataaaaatcctagaagaaaacctaagaaataccctaatggacatggccttagcaaagaattttgactaagtcctcaagaacaattgcaacaaaaaaacctccaacatttacaaatgggatgtgattcaactaatgagtttctgcacagcaaaagaaactgtcaacaaagtaaacagacagcttacagaatggcaaaaaaaaaaacttgcaaagtatgcatgcaacaaaggcctactatccagaatgtagacagaacttaaacaatccaacaagcaaaaaaaatgaccccattaaaaagtgggcaacagacataatttgtgttgaatgaagtctgcattttatgtctttttctttaaaggttaaatgtctcttttttcttctgtctatatttaaaatttttacttttatcttttaacagttttactatgttttacctatgtgtagttttattttattttattcttgttggggtttgtcaagtttattgtttctgtgggttagtgtttatcagttttagaaaattctcaaccattatctcagcgaacatgactcctaccttattctgcacttcccttctatctgggctcttggctgcttagggcttcataacctcagttactctaaaatcccttctgggatatttttaaatcattttatgcacattatctggttctctgcaaaaggatcaatctgatctaagctaatcctccatagccagaaggagaacatccccgtttgaggtgatacttcttatactgtcataatcctagccatagactgaacacataatatacttatttttacttagacatagtcacatatgtgaaatgtgagccaaatttaagttatgtaaaaagataataatgttgagcctattaagtaacattaagatctgcagtcctagtcaccagttgccctaagtgagagtactagggcaatgtgacctcactataaacccgtgcatgcttgaggggctgccaaatcacaagctggagtcagtggggggtgggagggggtaaagctactgccagaaatcccaagccaaagggaagcagaggaagggagccaggtgaaggaagtagcagcgtggcatattgtgtattggaagatatccagaagcactttggggccctcacaggctacttcctcatccacagatgatacccaggcctccctctaaaagcagataactttttgtgtctaagcttcagatttcttaaaatgataatcatgaataattatattacaggctggtaatgactgtaaataataaatatgcaaagtgcttagaatagtgtcttattcagggtaattgcttaataagtcagctatgataatggtgatagtgataataattattgtgtttaagatattgatgattgtgatgatggtcataaagtaaaaatgattatcattaccatgaagaaagaggatatcatatatatagtatatgtatatatacactcccccaaaaagtcagctatgacatgacagaatgctagacttccccttttaccttgaccttaatatacagtaagtatgtatgcttgaaccatcccaaaaccttccctcccaacccctggtccatggaaaaaaatgtcttaaatatacatacatactgtatattaaggtcaaggtaaaaagggaagtctgatatttactgcttttaaatatgttttctactgtaaagtggtcatgcttctgagcctctatctgattgaactggctgagttctatatcagggcaccagtgccctaaacagggtctctgtgacataggacatgcctccacctgggttctactccactttccctcatacaagtaatgtcaaggagagaataaagctaacttattgtcatagagcttgaagaaggacttcacactagtttttatagctcagagtttcaggatgattaataagcaaggactccaaggagaaacagcacatacttcagaagagacacattcctcattgtggctcttgctggaaaatattgataatagaaagcaattttcccaaggttcattcacataggactagatggattttttgcttcaagttcactgcatttttagaagggaataattaaaaaaaaatctaagtgccacttaaaccaaatgggtaaagcacctagatagaaaatgataaaatcaggacactgccatttctattcatgaatgccttttctgtcttcatttaacttaagatatttttgattgtagagaagtaaaacatgcataaaataccagccttttcagcaagtgataggcaactttgttgatacaaatggatttgatgattacttttcaagctgtagataaagacagaattgatggtgacagggaagagatggaacccatatgggaaaggctgaggaaataaacttgtccaggatgtatttctatgcttttttatgtacaaagaaatatacaaacatagaaatatatatatacacatagtatatatgtataatgtgtatattacatataaatatatatatctgtgtgtacacatacatgtacacacagaaggaaaatatcttttaaattgagagaagaataacagttttcccctaatctggctgaggttaagattctagcaaatatgggctcccattcataagtaaacttgtcccagtgaagacagaggaaattgtctaagaaagccaaagggtcttccactgaggtggaacagagtgacatgggttaggggccccatgcagctgaggattcttcatcaaagtgagttgtgcaataaatgtgcactagagtaaaattacgtaagcctcaaagtctcctctgaaccaccactgtctttccagacttgaggaatctcactttcctctctcatacaactcccatggttctctactcaatagcatctactatgtccctttttttctagtttaatcctcccagagacctagagttttcaaagacagaggcagatgatgggagaaaacgtcctagagcagcggttcccaactgtattggtctgttctcatgctgctaacaaagacatacccaggactgggtaatttataaaggaaagaggtttcattgagtcatagtttagcatggctggggaggcctcagaaaactaacaatcatggcagaaggggaagcaaacagatccttcttcatgtggtagcaacaaggagaagtgccaaacaagagggggaaaagccctttataaaaccctgagatttcaagagagctcactattatgagaacagcagcatgggggtaacgacccctatgattcaattacctctcatgggctccttcccacaacatatggggattatgggaactacaattcaataggagatttgggcggggacacagccaaaccatatcatcaacatttctggcacgaggaaccagttttgtggaagacaatatttctgtggacctggggtgggggttggggcaaaggtttcaggatgattcaagtgcatcacatttattgtgtgcttgatttctattattacattgtaatatttaaataattatacaacctcaccataatgtagaatcaatgggagtcctgagtttgttttcctggaactagatggtcccatctaggggcgatgggagatagtgacaggtcatcaggcattagattatcataaggagcatgcaacctagatccctcacatgtgcagttcacaatagggtttgacctcctgtgagaatctaatgcagctactgatcaagaagagccagagctcaggtggtaatgtgagtcatggggagtggctgtaaatgcagatgaagcttccctcactcacctgttgctgctcacttcctgctgtgcggcccagttcctaacaggcctctgactggtatgggggtagagggtgggggtgttggagacccctctcctagaggaaaggaaatgcaacagactggctttcttcttggaatcccctcatcagttctcagttttctcatctataataagaggagtttgaactataattatctgaagtctgccccagctggttactctgggagtctaggatctaaaattggggaaagacgacatgcacatagaaattacattttaaaaatctatatagtgtaggaaagaaggaagccctgaggctgaagcagtgactatgcaactctccttacagaagccatgttcaggagacctcattcccttttgcagaccctcattcacttttttcccctcacccctactcagaatcagagctaatttttcttaggaaagaaactctttccagaagtgaggcagatacaatgctttgcatttttcagatgagaaagctgtgagtcacagttgagtaatttgtccacagtgacacagtgtatctaataagtggtagagagaaacaagtaggagacagagacagtcatttgacagaatctcccttcccttgaacccttgtgtcaagagcttctgggatcctactttcaacactggtaggctggactgcttttggctgaggtgagttctctctaaagccatcttgctgaccatcactttatattggctgacctctcagtttcctctctgtaaatacaagcagcaatatctgagtccatgcctcccagggatagtaagataaatgagataataaaggtgagaaccaaatgagctcctcttaatgatggtgttaaaaaccccatgaggtactgtgatgttattaacaaaatgcagaggctgcagagttacatttggccaaattcttacacctctcaattttttagcaaggagacatagatatgaaatcagtattcccaatagtgaaactgactacaagtgtgttctcatttttaaacaaacctattctatgcaaatccaattaatagaaaaagtataccaatcaaggatctatacatatagctatctttcacaaaactattctagttttccttattaaaaaacttcaaaacacttcatgctttgtggcatttcagtgaaattggaattgtaaaataatgatttactgaaaaccttttaaaggtactgatctggcatgaagtgaggtacgactgaagtttctagacaaccatttgagattttggctgtggagccctcccaaaagaagattctaccagccagttgcatcacttgcaaatattggaggccgttgctctggaaaagcaactaaaaataatacctgggtgtggacaaaataagaagggagccatactcagctatgagccagtgtattgcaaagggccagtgctggtcaaaagcagtggggccatcatcttgatttagacatactgtccacttctctaatgcaaacccacaaaattgttgactcttagagtgcccacaaagcttctgctgtgacgataggacttttagggccatgaagaagctaacactaacttttacatttcaatttttaccttttcccacatagcttacgctaaaactcttcccaacttgtggcctggagaatgtatttttctggcattacattccctttccaacattattcctgtccctcaacctgttcagtaatcttatctaaaactactggataattcctttgagggtgctatcatagcccaaatatgtcaaggtctgtttttcactagtaaacagtgaacatcttcagttttaaatgataagttaattctacaacttaattgagcccatttatgtttattcattgctgaagttcctcttagatcttgccttctctcacatcttctctataacccaagaaggaacccacctagatctcctggaccccctcttgcctgatttaggtagatcatcataggagatgaaaaattatcatctcaaatttaagttttcaagagatggtatcaaaacacgcttttgtcaacaagcccaatcatattcccacaacttttgagtgctcttcctgattctagagcaaacacactgatttagatagagcaccatgtttctgaaccttgaataatcctgttcagattgaagcaggggtgtattaatagagcgcaggtcttggagttaaaccacacccgccctcacccccaaccccaccaccccacaacaggcttaggaaggttgctcaacctctcaaggcgaaggcgtttgctgtttctcatctgtaaaacaccaaagattgccatccccatcactgttgtggaagatcagcgagacataaagtgcctgtcaggatgtttggccaatagtggtacctgattcagtcattcagtgactttcacagtcaccttgagcttgactctctcaagaaaagaaaagaaattaagaagcatgtgagccattgaaccttgaccacaaatattctaagaaacttataactccttagccatatgtttcatttcaaatccaagtatgaaaaaagctatgtaactgaactaaaaagtggatctactctataatttattgtattataatacatatgtatacatctcacacactgtgtatttatactttaagagagaaagacttttataagactttttacgtcaagtgagggcatctgttcatttctgtagagcacatactgctttgctgcagagtgcagagagaatgactttgctcttcataccctaaaattgagtccaccagggatgaaacataggcgtgtagtagcaaaggcttctgtccagctgagcagtaaatcctggctgcccctgatgatcacagggactggctcctggtaataattttgatgtcattatcctctcctagaaatgcatgaatggttctggcctttaaaaacagatttaagaggatgcatttatcttgaccttatcagccttttaaagatcatgccgtagggcctgttgacctttctctcttaacgatgagttgcaaaacagtgggataacatcaatggatgaaagggagaaagagtgtgtaaccagaagcagcacccatggagaggaggaggtgggacagggatgttcaggctgacaaaggaaacttgctttagtcctgtgggaattgaagaatcccacataaatggaagcacaggaggcacaaatgggattccatttccatctctgctctaaatatgcagtccttgggtactgtgatggttaattttaggtttcaacttcactggaataagcaatacctagaaacttggtaaagcattatttttaggtgtctgtgaggggtttttccaaggagattagcatgtgggtctgagtaaaataggtggggaagatctgcctttgatatgaggaggcaccattcattcttccaagtccagaaaaggcaaatgtgtcaatctatctgctgaaactgggatacactcttcctctcttgttcttggacaaaaacttcaggctcccagcctttgggctccagaatttatagcagcaacccctttccccacctgaggctctcaggtctttggtcatggaatggggattgtcataagcttccttagatctaaggccttcagtcttggactgagccacactactggcatcccagggtatccagcttgaggatatcatgggacttctcagccttgataattacatgagccaatgcttttaataaatctcttctcatttatccatacatattttattgattctgcctctctggagaaccctaatagaggtatacatcaaggcataagtcaagaaaaataagatatttggcttattaagtggttggcaatgacttcaactcttttttttttttttgagatggagtctcactctcgtgcaggctggagtgcagtggcatgatctcagctcactgctacctccgcctcctgggttcaagcaattctcatgcctcagcctcccaagtagctgagactacaggcatgcaccaccatgcctggcgaatttttgtatttttagtagagatggggttttgcattgttagccaggctggtcttaaactcctgacctcaagtgatccacccacctcggcctcccaaagtgctgggattacaggtgtgagccactgtgcctggctgtgactccaactctccaacgggtaaagcacaaacacatttacttaactgcacccaatcttgtgaattttgacacttttaaattataggtagtgttcaccaattcaccactgtataataggaataacatgggattctgtgactgttcatgtaaaggattcatataaagctctatcattttctagtagagtttcccaaaatattttttaaaaatatcaagggtttctaacatctcaaggattaaagacaataataagtaaagagttcttcacacagttctttggtgatgccatgtgtttaattaatgctaatatcttctcccattccgccaaatttccctttgcaataagttgctcaatcgataaatcaaatgatgaaaaaaagatacagttgataaaaattagaaattgagaatgtctggcttccctgaaagttttgagatctagttaccgtgaccacatatttagggcaatacagaattttaacagagggaccaaaatttgaaattgaaagcactctgaaaaaatacaagagctgccatgagcacagtaaagatctctaatacacacaaataaaaatcgagtaagttaaaagcaccggcttttctgccctctcaacccaaggaggtcatatcaatgcacaaactaaaatgcacaattctatgcttacccactatcactacagcccagtgaatgctttaaatcccagacatggttaaaaatatagctggttatgtgattttctattaaacctaatatagtgggatgaaccataataccttacaggagcagatgaactagtatttccaaggcaaccaaaggatatcaatatcactttattattattattattattttcattctgcaaggaatcttccttgaagagcaattccttttatgcattggtctgcttgatagctttctgaataactgtaatccataaggctttgtacctctttttgcatgctggaaacactctgacttaatctaattatctcatgaaacttcactcttaaataaagcttgaagtaaaattagaaagcagcctctttcttttcctttagttactgtcttcatggtaccttcctcttggccggttgctcataagaaaatgggctatgcctctgcagagaaagcattctttacacttctctctggcaaggagaagttgggtttgggccaagtcgggccccatgaaaagagaataaaatatgactggaaaccttccttctgcatgacaaaggagtggctggctagaagcaaacatttattgagcaaatattggaagtcaggcacgttgaaaatatcactggtctaagagatctcagatttgccagggagaaaaatgggccaacatgggatgtcaatatactccaataaagcctataagggtcagcattgattcattatccaaacagtgtgacatttgagaatgaaaggggagcatcaaaaattctgcaaggacaactgacataaacattatcctaattaggatctaaatgtcttgaaacacaaaggagaaccctaattgaagtatacgtcaaggcatgagtcaagagaactaagatttttggcttactaagtggttggcaatgactccaactacaacatggatttggaggaaggtgggccaccagaggtttcagagaaatttttgcgttgggtcatgaaggaaaaatagatgttgttaagtggagaatcagaagaatgtttcatacaaaatgaaagagcaaggacaaagatatagagtagtaaaattggatactgtggctcataccaatttgaacccagagaaaacaattagaagatttcatttttccccttcatattgaaaaaatacaaaagactgacaatgccaagtactcataaaggcataggttaatactccatgtataggtagaactaatttggagaatatcaccgaagtgtctaataaaattgaagatgcatatgccctataatccggaagtcaaattcctgatataaacccacatgtgtatccaagaataaaaaagaacattcattgcatattgtttatcatagcgaaaaattagaaataagttttcatgaagtgcagaatggaaaaataaattgtagtaaatccatttaatagggtactattcagcagttaaatgaactaaaacccaatggatctatcaaaataaataagtctcaacaaacatattaagtggaaaaagaaaacaagctacagaaagatatgttctataagataccataacaataaagattaacagcatggaaatagtactacaaactgtttaatgtatacattaaaaggcttgcatggctactgtacataatgctgcaatgaacatgcaagtgaaaatatctcttttgatcaattatatacaatagggtttgcactcctaagagattattcagcttttaaaaagaagaaaatcctgccatttgccacaacatgaatgatcctagaagacattatgctaagtgaaacaagccagatacaaaaatacaaatattgcgtgatatcacttatatgtgaaatctaaactagtcaaactcatagaagcagagtgaaatggtggttgacaaaaattcaggaaggggtaagtgaggaggtattagtcaagggtacaaagcactttatccgcacttggaatatacaagtcctagaaatctacagtacaggatagtgcctatagttaacagtattgtattgtatacttaaatatttgctaagatggtagatcttatgtaaaattttcttatcacacacaaaatagtagaaataataaagagagcagaaagaaacttctggaggtgataggtttatggcatagattgtggtgatggtttcatgagtgtgtatttatctctaaactcatgaagttgtatatattaaatatgtacagcctatgtcaattatatctcaaagttttttaaagcttgtgtgagaatgcaaatatagagtcttggacagtggtttgatctaggtagaaaagtaaagaagagaatcaattaagatgtacatagttgcctttaactgtgattgtatctttatttcttaaaagagaagagggaaatgtgacacaaattggcaggtttttagatctgatagagctgggggatggttacataggagtcccctctattttatggggagattagtagggatctgaagccaagctgtctgagtccaatccagtccagctcaaccacttcaccagtgcgtgacaccttgggagaatgattttacctctccaagtgtcaactcctttcctataagatatggctaataacagtgctacaatgactaaatgagttagtgtttgaaagctcttagagactacaggaataaataagtgatggtgaaataaaaataaacaatgtattgcacagctcaagtaggtagaggacaggagagctgggatgggtgatgataaccttacttcaatctcatttttcatgacaaggaaactaaggttaggggagtagaattaactttgattacaaggtagaagcaatcagagatatcacactgggctcacaacaaaagaactgtataactggaaggctccttggtgatcctactgatagggacaggaggcagagaaattctagccagaaaagggtgagtctctggtgaagccccaccttcaagctgaaaagcctgaaacaacagcccaaagtgagaaattctatcgctgtttttccacttgaatgtttccttttcataaaccacccatggccccaccatgcctcatcctgtgcctataaagaccccagagtcagccagcagagaggaggagcagctggatgtcagagagcagcagcttgacttcagagggatggcttgatggagtaacttcagagaataatctggccagagatggctagacttcaagggaagattacctaccctctcatccgtccccttttcagctccccttcccagtgagacccactttcattggcaataaaatctcctgcatttaccattcttcaatttgtgtgacctcacttttcctggatgctgtacaagagcccaagagccatgagtgtagatacaaaaagctgtcacactggccctttgcccttgctggcagagggcagctgcctcacacaaaaaaacaaaagactcactgagctgttaacatttaagccatccacagatggcagtgctaaaagagcactgtaacacatcatctggggcttcaggggtcacaggcacccctacctggatgctgccgtggggcccacatggagttcactcctgctggtgccgatgtgtctagtcagttccaacactcatgcactccagttcctgcctcgttcgctcatgcactctctcccatgaggagttgagggcggtgggctatgtaaatgaggcattcctgttgtgagtcccatgaaggggtcagggaagtatcctgcttcactagcatttagtacagaagttgacaaaacttttccatagaaaaacaggccttgggtaggatttggctcatggactctcaggctgtagttggccaacaccttgtctaggggttctcaaatattctatgcatcagaatcacctggagagctagttaaacacagattggtgggccccacccccagattttctgattcggtaggggtggggcctgagaatttgcatttcccacgagttcccagaggatgttgatgctgctgggccaggggccacatgtgggggtgtccaccgttataatgtaactttctcattttatacttgaatagaatgaggccaaactggatcaatgaatagaattgatccaattttgttaagtgagatcagacagcaagtaaaagaatttaggcttcattcgaaatcttgtttattttaaaataacatataaagttacaactgtatcctgggtgctgtgctaggctctgggtatataaagataaatgtgacatggtccttgccttccagaagcttgcagtatagtagaagaaatgagataatagatgatacagtatgtaagactcctgggagcataggaaacattgggaccccagagaattacctggtttcttgaaggaggggccacctggagtatcttgaagaataaatagtcatccaacaggaaaaataggcaggtgaggggaggaaattccaggtaaagggaacagattgtgtaaggcataagagaagcaacatggcatcatgcttcacagtaggaattctggctctgctacttactagcctgggtcagttatttaacctgaaaacctcagtgtcttcttccaaacatagggataataaaagaactgaccacctagggttgatgtgtgaattacataagataatgaatgtatagtgttttggcctagtgcctgaaacacaattagtccttaataaatatgggcaattgttatttgtgttattattatagccagtgatgtatcagagcatgatacattcacagtcattaatgaactaaagtatgaggtgcaggtggagctactgaggcgggcaaggccagaaaatgaaggactctagtccctgcctgactcagggagggcagtgagcagagagtggcagaagagtggcattctaaggtctccattataattgaaggaggagagaatgattaagacaagtgatgtggtaaccaagaattgggaaaagattttgaagaaaagatgatgaggtcaattttggaaatcagtgggatatcgaaatggaaatgtctggaactcaaaagaaagatcttggctacccaaattcgaaatccctgggttggcagttgaatagatggaagtgaaatatcaccctgcaatattatgtagggagaagagagttcacaccaatgcttaaaaagtcagcattgagaagtagaaaagaagtagaaaagaagaatcatgagacagcatccaagtagctaagagagaataattttaaggaggagttgcagtcaacaatatagaatactccagagatcaagcaagataaagatcagtgagtaacacctggatttagaaccaggagaggcaacttagacctctgctttatactaggtggaatgcattgtgtacatttcataaagaaatatatatttgcatataaggtaaaaggggataagcagaaattaagtcaaagagcaatttttctccccataatgaacaaaataccctcctcctaaaaacctcaagaataaagatttgaaagctttactctcaccctctccccaaggacattccaagccctctgtgatccccagatgacactagaccagcctcaactcctctgacatttttatgaagattgtcttaactatgcagagtctgtattttcccaatacacaccgtgacttttctagcctctgtgcctttggtcatcctgctccctcagtgaagaattcccttaacttttcctaaaataaggaaataattctctcataccttaaagcttgattcttgttccataccagaccctcattatcttgcccacctactactatcctctggcccaaaactctttatagcattttttttttcacaacctacactccttttatttacctcctcaattcctcaaggtgaaaaactactccctctctgttggtgtgtattctatccaattgtttcgttgtatccaagtgcctggtatacagaaggcagtcaataaacagtattgaaaggatggaggaaacaggtatcatgcttaaaatgcatttctaaataattcaggacaagcaaaagaaaattaattaagaagttatgcacataaactgaacaactgagtgggatacagagaactgaagtttacagagaggatgtgggagaggggacggcttacgaagaagaggaaagtaaccaggtatctactaggcacacttgtcaaaagtaattttatcgtcacataaactttaaaatactgttatcgttcccatttcaagaatgagtgcacagaagcttggagaggctaccaatttttgcccaaatagagcagcttatgtcagtacaaaattgaatatgattcttacaatacttcaggattctgataccatgttgctttttggaattagaatacagaagactaaactgaattaaacactaaagcaagatgtaaatagagacttggcatccattaactgatctagtaaatggcatctgtactgctgaggcaataacagatacgtgtataaaaaatggatttataaaggagagaaatcagatctgtctcatctacttgcctcatacaattgtgatgagaagcaagtaagacaatgtattttgcaggcattttgcaaaactggaacaactctctgtatctaagagacaataagttataggactcctgacttcctccctgctctacactctttaaacatttctcttgccaattttttgcttatcctttcctttttgccttaatcatcaaaacatgattgcaattaagacttggtgtttctctgggtcctgtttcgaattattttaataacatggtatatttcaagaagtatttcaaatagtgtcatagaaattttgactaggggtcagaaggcctgttatttctcttggcctcactttctttacctgtaaagtgagagaacggaattaaatgatttctaaaatttttcccaactcatgcattttataattatttactcttctgaaattcctgtgataagggaagtgtagattaattctcccccatcttgacaatttggttcttaggaatctgagaatatctttattttcttgttcttgatatgattccaagaaagcaaatacgtattagacaaatttctctctgagtattattattgtagcactgaaatccaggatgagtaactttttcctctaaatattagattaagttcctattctcactgttgacagggattaaaaaaatacttccattccacacagcaccttttgtcagctagaagctgatagaaaatttcaggggagaagtgatcatcttaaacagcaggccctggctttaattcagggaatgaaagttacattgattttttttaaagtgatctgaaaccagcaggaatctctatccaaagcccagacagatggctgaaccaatgggctccctgtgatcatctctgctacccatatatcatttgggtagaaaataaatgggttttaaattacctttagttccagatagacctagaaattaaatctctacacatttgaaaaaagctaataccaccttaagctgcattaatagaaatcaatttctttgtcatgggaagtaattgactcattcaccctatatttaagttagaatattcatttcttttaatcatatgctaagtgtaaaagtaacacattagagtttgtccaaagaataatgggtagtacattaagagggtctgaaagtcatgttctctataagacaacagaggattgtaattcagataaaagacgatttaagagagacctcataatggtcgtcaattattaatatataatacagtacattctatgttattcaggaggacatagcagataaacaggaggaagagatatttgattaaatggtacagagaagattccaaaggatcaagcaatcctgagttagaacaggtcttctcagaaggtgacactgactagacacacaatgtgtgaaggagtgggcaaatggctatcagttggagatgatatagctgggaagtaacaaatattctttataaaattaagatcccctttttcctttcttttttttcttttttttttttttggagtcattctcaagtcactttcaaaatcaataacagaaaaaccaccatctcccctggaggaaagacatgggctctcatcttcatctgtaaacatggaaccctgatatcaggttccataaatatctgctctatttatgagtgctcatgtttgttttccactagtggtatcatttttattacaggtattaggaccctcatatccttttctatgatagcaatttgctctctgtttttccttgaaagccttctctgcattctagagatgttgaatgtaggtcttcaaatagagaatcattaaagaaactttcatttcagaccaccatggaatgacagggatgagattaccctcatgccttaaacaattagataattagtatagatacataaaaagtggttttcagacattggacagcaggctatgcaggacaatgatccctgaaagaagagaaacaaacaagatgacccttataaatggcccagagcatcatctgaaaaaaatgtttccagatcaaagcacagagagggagaacccaaaccgaatccagtagcctcactgagtggaggggacagagttcagagttcggagagaccaaggcagctagaaatcatggtgcaagttactgaagaggaaggaactattccaagatggactgccagaaatgtgcagatgggtcttttgagtctttggctgagggtgaatgttagcatgctggagagaagaatacccaaagccaggggagaaaactgaaaagaggtaatcacaacaatttctgaaggtcacaaagggctgggaagagtttgtattcccaacaggtaaaggggcaatacacaggtaaataatacacacaacatcaggtagaacccatgaaagggcatggtcttggtagaggagctaaattagccttagaatgatttctggaactaccctaatgaagcaaagcttccaagcctacaagagattccaagtagcttaactgcatactagaagaaaatccaacactagaaaaggaatatgacaaaatccagcaacccaaaaagtaaaattcacaatatctaccatcaattcaaaatggcaagacatacaaagaagcaagaaaagataacctgtgcccaggagaaaaaccaatcaatggcaacaaaagcagaaacaacacaaatgatacaattagaagacagaaacattgagattgctattatcatgattttccatatgttcaggaagtagacaaaagcatgagcatgattagaagataaatggaagctttttactccccagctttattaaggtataattgacaaataaaaattgtatatatttaaggcacacaacatgatgatttgatacaggtgtacattgtgaaatgattaccaccaaattgataaacacatctattatctcacataattacattttgtgtgaatgtgtggtgataacacaagatctactcctttcgtgaattaaagtatacaatatgatattaagtatagtcaccatgctgtacattagatactcagtacttattcatcttgtaatgaaagtctgtactctttgacgaacatctcccattttcactgtgctctgctcttttcccttctccaggctctgacaatcaccattttaccctctgcttctatgagttctaattttttatttcacatataagtgagatcatatagtacttgtctttctatgtctggcttgtttcatcttatataatgtcctccaggttcattcatgtcgtggcaagtgacaggattttcttcttttttacaactaaataatattcctctgtgtgtgtctgtgagaaaatcacatgttctttatccattcatccatcaatggacacttagattgtttccatctcttggctataatggatagtgctccaatgaacatgacactgctggcatcttagagatactgatgtcatttcctttgggtatatacccagaagtgagacagcaggatcatacagtagttcaattttaaagttttttgaggaatatccatactgtttccatactggctgtaccaatttacatttccatcaacggtgtataagggttcacttttcttctcatcctcaccaacgtttgttatctcttgtctttttcataatagccatcctaacaggtatgaagtgatgccttgtggttttaatttgcatttctcttatgattaatgatgttaaatgccttttcatgtacctgctggtcaattgtatgccttttttaaaaaaaacatttatctagatcatttgcacaattttaaattaggggtttttttgtttgggttggttgctattgaattgtataagtttcttatatattttagatattaaccatttatcagatgtataatttgcaaatattttctcccattctatagtttgccttttcatcttgatttttttctttgttgttcagaagattttagttttatgtagtccaacttgtttatttttgtttgtgttgcctgtgcttttgatgtcatattaaaaaaatctttggcaagaccaatatcaaggagctttccccctatgtttacttctaggagtattagtttcaaatgtcacatttaaatctgaattcatttcaactttttttatgtgtatgatgtaaaacaacggtctaattccattattttgcatgtgaatacctatttttcccaacatcatttatttaagaaactatcctttccctgttgtgtattcttgacacccttatcaaagatgcgttgagtgatgtgcataggtttatttctggtctcttagtctgttctattggtctgtttgtctgtttttattctagtactatactcctttgattaccagagctttgtaatatagcttgaaatcaggaagtgtgatgcttccagttttgttattgtaatgcaattttgcattggatattcagagctgtttgtggttgtatgtgaaatctaggattgtctttctgcttctgtgaaaaaatccactggaattgtgttgaatctgtagataacttttcgtagcatgagcattttaacaacgttaatccttccaattcattaacacagaatatcattctatttatttgtgtcttcttccatcagcatctcacagtttgcactatagatcttttatctccttagttaaatttattcctaagtattttattctttttggtgctagtgtaaatttgattgttttcttaatctcttttttgcatattttgttgctaatgtacagaaacaaaattttttgcacattgattttatatactgcaactttactaaatttattagttctaacagtttcttggtggagttttagcatttctataaataagattatgtcatctgcagagagagaccatttagcttcttcctttccaatttgaatcttttatttctttttcctaattgctctggctagaacttccagtactatattgaataaaagttgtgacagtgggcattcctctcttatttctgatcttagagaaagagctttcagcttttcactgttgtgtataatgttagcagtgggcttgtcatacatggcctttattatgttgaggtacatttcttctatacctaatttgttgagaatttttattatgaaaggatgttgattttgtcaaatgctttttccccatctattgagataatcatatatttttcataatccattctgttatgtggtacatcatgtttactgacttctgtatgttaaaccatccttactttccagtgataaatcctacttgatcagggtgtatgattctattaatgtgctgttgaattcaatttgctagtattttgctgaggatttttgcatctatgttcagcagggatgttggcctgtaatgttctgttctcttagtgttcttatttggctttgatatgaaaatcatgctgccattgtaaaattagtttgggagaattctgtcctcttcaactttatcaaagtgtttgacaaggactggtattaattcgtctttaaatgtttggtagaattcacccatgatccatctgctcctgggtttgtctttgataagaggtttttgattactggtttcatctcttttctcactattggtctgttcagattttctgtttcttcatggttagtcttgagaggttgtatgtttctgggaatttattttttatttttatttaagacagggtctccctctgttgcccatgctggggtacagttgcatgatcattgctcactgcagcttcaacctcctgggctcaagcaatcctcccacctcagcttctcaaatagctgggactatgggtgcatgccaccacacctgactaatttttgcattttttgtagaaatggggttttgtcatgttgcccaggctggtctcggactcctgagctcaagccctccacccacctcggcctcccaaagtgctgcaattacaggtgtgagccacagcacccagcctgggaatttctttagagaaatggaagctttccaaaatatacaaagggaacttctagacataaaaaatttaaatatctgaaatgaaaaaatatacttcatgagattagtagcagattaaatactgcagaagaaaagatcttgaactagaagaaacagcaacagaaactattaaagtgcaaagagaaataaagaagaaaattgaacagaacctcaacaacttgtgaaacactatcaagcaatctaagatatgtataactagaatcccagaaggaattgagattggaaagtgggtgatggtaacaactgtgaagaaatcatggccaaatctttccaaattttatgaagacctataaatccaagaagctcaatgaaccataaaaaattgaacataaataaaaccacaataagatgcatcataacaaaataaatgaaaaccagaacaaagaaaaaatcttagaagtgggcaaactaaaaaatatattacatacagagatacaaaggtaagaatgctagtaaacttacttaaaactacgcaaaacaaaactaactgatgcaatatcaaatacagaaaaccaaccatcaacctacttagattttattatctagtaaaaacacattttataaataaaggttaaataaagcccatttcagaaaaaaatatataaaaacattcattgccgagagctctgcaatatttcaaagaactatttaaggaggtactaaaatcgtatagaaaatgatagctttatagatggaaatttggatctacacaagggaataaacataaaagttaaatatttggataaatatgaaagatttttctcatttttaatttcttcaaaagataaattatgatttaaagtgaaaataacaattgtaatacagtatataacatgagtaggaataaaatatatgacattaataccacagagccaagaggagggcaatggaactatactgttgtaaggtttccatatgctaataagagtgcttcaaaataaataaagaaaaattgctagaactgaaagaagaaatatgcaaatccacaaggataattggagatttcaacacacctcattaaataattgacataactatgaaaaaatcagttaatgtacggaagacttgaaaaacactttcaaccaatggaacctaaacgacatgtattttaaaactccaccaaataacagcactatatgcattcatttcaagtgcacgtggcatgttttgcaatttgatcatactgtgagacataaaacaagtcttaaaaagttaagacgtatgacaatcacaacagaaatgaactagatatgagtaataggaatatacctaggaaaattttaagatatttggcactcaactagtgtattttaaataactcatgggtcaaaaattacagagaaataagaaaatagtttgaactgaataaaaattaaatcacacatactaagatttgtgggatgttgctaatgtagtacctacagggaaatttccagcactaaattcttatattaaaaaataatgcatgcaaggtttttagctttcagcttaaaaaactagaaagagcagagaaaactgaacctaaaataaagaaaaagacataataaagaaatcaattaaatggaaaacaaagaaaaaagaaaatccatgacaccaaccaagaactgttcttttgagaaattgacaaaattggtaagcttctagtaaaaaaaaaaagaatttaataggaaaataatatataaaaggtataaattatcaacagtacaaagggaaggaaggaatttatcactaagattctacagacaccgaaagtatactaaaaggatataatgagtaatgttatgctaataaattttacaacttatatgaaaatgacaaattccttgaaaatactttctaccaaagcttactgtagaagaaataatctggatagtcatataacaattcaagatattgaagtagttataaatctttataaaaattgtgtaggcctagatggtttcattgatgcctttctaccaaacatttaatcttctagaaaatagaagatgatggaacactttacagctcctttcagaaaccagacacagaatcaccttgacactaaaaccagacaaaaacattatatagaaaaaaaacttttagaccaatatacctctttaacataagttcaaaaatctttaacaaagtattagcaaatggaatacaacaatatattaaagaataatatatcatagtcaagtgcagttcatcccagaaataaaaggttggtccaacattcaaaaacaaatcattaattcaccattttaacacactaaaaataaaagaccacacagccatttccatagatgcagcaattcctctcctaggtatttaatcaagagaaatgaaaacatatgttcatacacggactttgcagatgaatgttcataagttttatttcagataaacaaaatctagaagcaactcaaactgttcatcaatatgtgattgtgatgtatgtatagaataaatcactattcagcaatataaaggaatgaactgctaatacagtcaacaatataacatggatgaactttaaaagcaccatgctaagggaaagaaatgctacaaaagattatatgcatatggttctcttaatatgaacctctgggaaatgtaaaattgtattggtttccaagggtgaaggggtcagaggagttcctctactacaatgaggcacaagggaacattttgggatcataaaaatattacatatcctgcttttacagcactgtatacacttgtgaaaactcacaaaattgtaaatttgaaattaaagaattttactataagtaaataatatctcaacagaatagatatttaaaagactataaggttttcacaagtcttaaattttagactataaactctcaacatctccctttttcctaagtcttttaaaatgaaagttcaattttaagaaaagtttcacacaaaagtaattcatgcaaattatttttaaaaatagaaaatgtagaaatgtacaaaaagacaataactatcatccagagataaatacttattttttgcagctttccttccagagtttttcttctatagttatgagagaatataaaaaatttaataatactgtatatgtgattcaatatcttgcttttatcactaaaactacaaaattaaaacctaatatatggaatttatttccctgattagaaaactcagaatatctagttcataagtattgcaaaataactctttccaacttaaaaaattccagttagaaaatatgttttatggtgaaacaatattatattagtaaaataaaagcctgaaaaagtttcatttggtcttatttagatgaaaacaaatgaattttcaagacttgcttctcatctatacaccaatggctccatccaatctcccacacccacaaaaattaaaaaaaaaaaaaacatttgtttttggttttattttgctgaagcatctgaaaggcagtttgctgagagccaaactgggggaaaaaatgtcttgtttagagttcaccctatctgcaaaagtcttaactttggagtcagtcacttaacattcttggttttagtatatatttcaggaaaagatgtaataaatcactccaagatacaaatgcatctgggaagcagaatcattccactggaaagcaagacaaagggggcagtgctctgcaggtactaatcagatagaaagaagcagctgagagcgatttcttgcatctgtttatcaagtacataaatactttaagcacctactgttagccaggcaccgtgcaggcagtatagcgggtggaaagatacaaattacttgccctctaggacttgacagtctgtacacacaaattcctataatgtgatgtctatcgtaaagagtacaaagaaagtttaagaattcagaattgaatttgatcattttcagctgaaacatcaaggagccatgaaagggggtaatctaaagctggcttgtgtggaatgagtcagatttcaacaggcaggtataggagccctcagggtggggtagagtaggaaaataatctgaatatgctgagaggcatgacaaagctgctgagctgagaatgctgaggacatacccagggaagagttaattagtccaggttgacagcagtagctacatgctggggaattgtgactgatgagcttagaagttgaggccaaattgcagatggctttggctaccaggagagatgtgtagacattaccctacaagaaatgggaggtcattgaaggttttcgatcaagggtataataggatgctgttgtgctttgattagtcttgttgcaatgactaaaaaatgattgaagaaaataaaaacaaggtaggggtttatcacaatattctgaaagcctgaaaccacaatggtagcagaaggcataaaataaaatgacatatataagaattattttgtagttaaaagctatgagtttgagcaatattgactttaagtggtgggcgttaggaagaatcaagatccagaaggctaaacaggagcagaagtactttcattgccatctcacatattcacttatgattgcgagagtctcactgaatccaggtgtgaccacaggatgctcagaatagtaccatggcagagtactcagaatgtgaattctgcagctggactgcctgggtttgagtcctgattctgctacttactagctatgcggccttgagtaagttactaaaccagcacatgcctcctctcataaaatatggccaacaatcataataattcctttatgtgaaagttaggagaaataaacaagttaacatttgcaaagtgcttggagtcatgcctggcacaaagtaagtgttttacaagtgtttgttaaaacaaacaaaacctcactatgttcacatagtcctatattaatgtgagttgccattgtgggtgaaacttttggcatctctgcccatctcctaaagcgttgtcttttctttgttcttaatcttttgtttgaaagctatattttctctttagccaatttcattcactcagtggctataaatatcatttgtatgttggcaggagacaaatgtgtatgtcccctcagacttctcctgccaacaagatgccttcttttgaaagtttcacaagtgcatcaaaattagcatgactaaaacagaatacatttatgtgctgcatatagatgtttcagtcagtggtggactgtatatacaaccataatcctataagattatactggaataccatatgttttactggcccttttctatgtttagatatatttggatacacaaatactcgccattatgccacagttgcctacagtattcaggacagcgatatattgtgtaggtttgtagcttagcagcaataggctataccacatagcctaggtgtacagtaggcaatgtcacataggtttgtgtaagtgcactctatggtgtgttcacatgacaatgaaatagtctagcacatttctcagaacatatccccactgataagtgacacatgactatttgaatctccccaccccaaacctgaatcacctatagtttaccaattcagacaatggcaccatcattcatggaggtgttgtaaatccaaacttaagattcatccttcgttgcttttttttcccccattcaatacatcagtatgttctgtagacattgtctccaaaacatttccagagtcagtcaatttatcgctctctttactcctgactctccaagtctagtcactgttatttctcaaaagcacttctgtaatcgacatctaagcagtttctctaattccatgcttgcccttttctagttgattctccccacaacggctaaacagattggtaaacaatgtatatcatgcatgccactactctggttaacactctataatcactcactactgaataaagaattaaacctcaatattctcaaatggcctacaaggcctcttcttcccagcttctcattctcttttcatgtccttcaatcccttccttggctttctctatcatcttccaacatgccaagctctttctcacttcaaggacttccaaggtttgtgctccaccttgttgcaactttctaaacttgctggtccactgaacaaattctacttaaccttcagggctcccttcaaatgacatcttcccagcaaggccccccaactcttatttccttcatagaatgtgcatactttgaaaatacgtatttattgtagacttgtttggttgatatttgcctcatctcctaaattataagctgagaggacaagaccatatttgttttgttcactgctatacacccagaccctgtttagtgcctgggttgaaatgtatgttttgacaagaaagaaaagaaaaaaaagggaaggaaggaaggaaggaaggaacgaaggaaggaaggaagggaaggaaaggaaggagggagggaggggaaaaatgaagaatggaggaaatgaagagtgggaagggaggaaggaaggaagaagaaaagaaaagaaaagaaaggaagaaatgagggagggatgaagagagagaagaaaagaaacaaaggaacaaaggcacgtaaaccctggaagacaacctaggcaataccattcaggacagacatgggcaaagatttcatgatgaagacaggaaaagcaattgtagcaaaaaccaaaattgacaaatgggatctaattaaactaaagaacttctgcacagcaaaagaaactatcaacagagaaaccagacaacctacagaatgggagaaaaattttgcaaactacacatcctacaaaggtctaatatccagcatttatagataacttaaattcacaagaaaaaaaaaaaactccatgaagaagcgggcaaaggacatgaacattttcgacagaagacatatatgcagccaacaagtctacaaaaaatagctcaacatcattgatcactaaagaaatgcaaatcaaaaccacaatgataccatctcacaccaatcagaatggctgttattaaaaagtcaaaatataacatatgctgacaaggttgtggagtgcctatacatggttgatgggagtgtaaattagttctaccattgtggaagacagtgtggcaattccacaaagatctaaagagagaaataccattcaactcagcagccccattactgagtatatacccaaaaggacataaatcattctattataaagacacatgcatacatatgttcactgtagaactagtcacaatagcaaagacacggaatcaacctaaatgcccatcaatgatagactggatgaagaaaatgtggtacatatacaccatggaatactaggcggccataaaaaagaacaagatcacgtcctttgcaaggacataaatggagctagtagccattatccttagcaaactaacacaggatcagaaaatcacatacttcatattctcacttataagtgggagctaaatgatgaaaacacagggacacatagagggtaacaatacatactggggcctttcagagggtggagggtgggggaagggaggagggatcaggaaaaataagtaatgggtactaggcttaatacccgggtgattaaataatctgaacaacaaccccccatgacataagtttacctaggtaacaaacaaacctgcacttgtacccctgaacttaaaaggcttttttttttaaaaaaaaaaaaaaaaagacaggcattcaccaaccctgatgagtagccattgacttttgcctctcagacctggcaaggcattgaaacaatggagttaagaaggataaaccagtttggtatgaaaagaggactcacttagttttggcttattatcattcagggcacacatatttactgtctcctccatgcatgcttcccacatgttattacagaaaagatattagaaaagaaatgaatacataacaacttcaataaatatgaacaagtggtacttgtaagaccaggaattttgaggagttttcagaagatatcaagtgaataggatcagatttaataaaataataaataaataactaggactgagaataagctccttgtagtataatagcttttcttcctaaattctcactggctccttagataaaggttaaacctgctgacaaaagtactcggagcagaagcagcttacatagggcaataactagagtacaacctatgaaagccttggctgcttttccttctcctcctttgcatattaatgctaagtttggatatggcatttgctcccatattgaaaccgtgtaaagggccttccagtaaagcaatacagtgtgtatgagtatgtgtgtgtgtgagagagagagtgtgtgtgagtgtgagtgatgtgtgtgtgtgtggtggcttcctactatgtgcctggggccagagagaagcagaccaaaccaaggtaacttcagaaccacacagctgacacagaaatgaaaaaataaggacaattctttagaggactaaaatgcaaccatacatatcacttcctaatgttttccttactttagaaatagatttcaccaacttgtctctttatcctctgctcctatatcttgaaggaagatggtgaaatcagcattgtctccatttctaaccctctcattaaaagtagggggctatcataggcacaggtgtaactgcagaggaaatcataccagcttccaataccaactgagctctttgtttaaaacaggaacaaatagataaacataaccagacatctgagggaaatcaatagcatgagagagaagaaccaagattaacaaagaaaggtaacataaaaaacaaaagaaaacttttaaaaagttcaatcagtatacttgcaagaatttagcaaactaatatgtctataaaataagaaaatactcaaacggataaatagaaaaaatgaaaagtttttggaaattaagatataattgtcaaaatttaagaaggtaacagaagtcctgtacaaaagaatggacattgctgaaagccaaagaagaaatatggaagataagaaaggaaatctaaaaattaacataaaaaggcagagatagaaattgagtgcacagaaaggatacatgttgcgggaagtcagggaccccgaatggagggaccagctgaagccatggcagaagaacataaattgtgaagatttcatggacatttattagttccccaaattaatacttttataatttctcatgcccatctttactgcaatctctgaacataaattgtgaagatttcatggacacttatcacttccccaatcaatacccttgtgatttcctatgcctgtctttaatctcttaatcccgtcagcttcataaactgaggaggatgtatgtcacctcaggaccctgtgatgattgcattaactgcacaaattgtttgtagagcatgtgtgtttgaacaatatgaaatctgggcacctcgaaaaaagaacaggataacagcaatgttcagggaacaagggagataaccttaaactctggctgcctgtgagccaggcggaacagagtcatatttctcttctttcaaaagcaaataggagaaatatcgctgaattctttttctcagcaaggaacatccctgagaaagagaatgtgtccctaaggggaggcctctgaaatggccactttggggacagctgtcttttacggtcgtacataagggatgaaataagccccagtctcctgtagcactcccaggcttattaggatgaggaaattcccgcctaataaattttggtaagactggttgtctgctttcaaactctgtctcctgataagatgttatcaatgacaatgcgtgcccgaaacttcattagcaattttaatttcgccctggtcctgtggtcctgtgatctcaccctgcctccatttaccttgtgatattttgttaccttgtaaaacatgtgatctctgtgacccataccctaattgtacactccctccccttttgaaaatcactaacaaaaacttgctggttttgcggcttggggggcatcacggaacctgccgacatgtgatgtctcccccagacacccagctttaaaatttctctcttttgtactctttcccttatttctcagactggccaacacttagggaaaatagaaaagaacttacgtgaaatatcgggggtgaatttcccccgatagatatggaaattataaatggaaagaaaaaaaggcattaaagacccatgtgttgcaaaaactatccagaatgagagagtaggggtaacagatgggagaagataatcaaagaaataatagaagaaaatttttctaggaagtgacttgaatattcatttagtcgataagatttactgagctcttactttttgccaggcattgttcttagcatttacagatcaggaaacaaaacaggaaaagaaatctctgcctcccacaaataattaacaaacatatacacttagatatatcccagtgacatttttgaacttcaggaataaagatgatatcctaaaaaagccagtaaggcctggtctggtagggaacatttatctacaaaagcattagacttatctgagactctttgcaagctggcaatagagtaacacctaggactatcttaaggaaagaaggtaattttgacactagaattttattaccagatgaactgtcagtaaagtgtgagggtgaagacaaaccttttattggacacctgaggactcagaaaactcatcactcatatatccttctggtgaaaaaaaaaaaaaaaacaaagcaaaacttaaatatggagtttccaaaactataaagtgaatttaaatatataccacaatatgtgagaaagaatagaaataatctaggcagtaaaacaaatttagtgtgatatctgaaaacaaggttagaaagccatcagttgatattagaacagcatgttggaggctccaagaatgtattcaagaaaaagtagttgtcataacaccaaattcctgattaaaaatcaagactgtaaatgtattgtgaaactgatatattattgtgtgatatattataaaaagtcctataataatatattactgataccgtttcagacagatgagatgaagggttattttctcccaattagccataaaaaggtaatattttcctagtaaaaataaatgcaagaatggcagtgtctgaatataaaactcttttaaatgaggcataattctgggcaactgatatagtgttagaaagatccttcaggggaaacccatcatatctctaagaataaggcagatagcctcaaataaagcataaaagtatttataattgatattagctacaccctgtgaatttcaggtgatcacatggggaggtaaagctgaccaaattcttggaatatgaggttgtaactgggaagtgactggaactagggtgggagattttgtagtagttcacataaagcaggtgaccactgatggaagctgtgagaagaggagatggcagatgaagaggctctggaagtctaccttttaggaggtgacatgaggaagagcaggcacagcgggctgcaaaggaaccctcaaatctataaatatgcactcttccagaaaggaagaggaggtgtccaaaatgagactcactggtgattggtgattggaaaggcgacaagggcatttggcaggaagtgatgacccaattctgttcagtgagggaagaaggcagcttgcagggcaatttggaattggaatgcaaaaatcataagtcaccatggcgtctattcataagaagtcatgaagcgggttggtggggagaaagaagccccctaacctcagccatgatcatcaaaacgggtccttcaactgaggctgggctgggaaagaggagctggcttgctagtgttgtgaaattttcaaagtaagagcatcccatgctggatacttgctgcataaaagcctttgctatatagtttatcttttttaagactgttatagaaactacattttataagtgtccacaggcatatccctgtcatgcttttgcagttataagaagtagaattcctggttgggagttatagtcttcctgtctttgattttcttctgcttgacaaaaaggaataacctgaggttaaagcatcctgctgtgtattctgtaaacaatcccattatcatacaaccacccagtgagcactacttacccttacaaagtatcaacagataactaaactgctcttcagtaaagctatatctgatttcaagtacaaataaaagctctaaatagtcacacagaatgatatagttgatgtaattcaagctctgttctttgtgtttacaatcatagtgctattgtttattttatatgaactgctgaaattcaggaatatgtggtacaacagcgattagagacacgacttggcctacagtagctccaccaatctggaaccctttgaaatgttctcttggaacaaaactcatgtagctgaatgcctctgtgttggaggctaactgaataattagagtttcccccatcaaattctatgtaaaatacagtgcatagtagagaatcagtaacaaaaacatgcaattgacccttgaacaacatggggtgtgagctacgtaggtcgacttatacacagattattttcaataagttacactgagggtgcctgcccatcctgcttccccatctatctacctcttctgcctctgccaccactgaaacagcataaccaacccttcctcttttccctcctcctcagcctactcaacatgaagacaaggatgaagatctttattatgatccacttccacataatgaacagtaaatctattttcttttccttatgactttcttaataacattttattttctctagctttgtttattgtaagaatacagtatttaataaatatataaaatacgtgttgatgaactatttgttatcagtaaggcttccggtcaaccataggctcttagtagttgagttttgggggagtcaaagttatacatggatttttggcggcatgggggtcagcatccctaatcaccacattgctcaagggtaaattgtattgttaaaactcaacagtaactacagcaattgtttagagcttagacccacaaaaggtttttcgaagtggagtattttatcactggcatttttacaatttccagcacctggggataataaaaagcaggtcatttggtgggtttcattattattattaaattctctccagacaatgcacgctgttactgcctgcacccagcatggaacactccctatgttccttcctttgtgcacttctgactgtgtagatcctgaagttccaaagtgtttctcaagaggttgattagctagaaccacttgtgttgattggccagaaatttcctggtgtgactaggaaagccatgaacctctgagaaggattggtacaaaagcctatccaacaggagtacttcatattggatggctgcaacgtgacccaaaccctctcagtgctgaaatatatatgcaggtttatatacacttacatgaggtagtgtctttaagtacaatacgctgtagttggcacatactgaaaagccttacacgtgcctccctggatcagatggaactcagaaggatcaggaactcagtaatggtacaattgatcaggttgcttttatacaactttaaatagcctaaagcaaaattataataataaaaatcgtaatatctttgtatactttcatagtctatgatgcaggactaactctaatacaaaattttatttttacaaaaatgtttgagacacatttctcattgtcttattgtctgtattttacaaatgagtaaactgaggctctgagacattaggtgattttcaaacattattgtccatcaaatggttggaacacaatggagtgggatccaaagcatgaccttctaagtccagtgggctttctgccgtgcagctctgaagtgtggtaataatagggactctcataaatgaaatgataaataggactgcttactggttacatgaagttttcaatctgttattaagtagcagttcagatttcactatgtttaatccaccagcaatgatcttttccatcttgcatacctggcagatgcctattcatcttttaagccctatgtcaagagaagccttcatctgcaaagccttttctgaccccaaaggtagggttagttgttttcttttttctgcagccaatccacatgtgtggatcccaccactcatgtctcacatgccttattaggctaaactgtaactcttaatttgcatgtctgtctctaaactcaactgcgagctcttaagatcaggagctgtcatttattctgatttgtatacctagtgtctagcagagtgtctggcacatcaggctctgagtaaattttacacactatgcatccccatttttggggaaaagaaataacaaagtatttctaattgagggtgagtcagtgtaacatcaccctctcatactgagagaatatatccattaaattctgcttgcttcctcttagagatgaaaaatcagaaatctagagagagagacttgcatcactgcctccacttacaaacactgatattgagaacataataaaattatcctgtggatgaaatcaatattctattccttaatgctgctaactataacttccaaaccaatcttagcaagctcacaaaaaaatatcagagctggaatggttctttggaaaccatgcagctcaataccctgattctataggtgaggaaaacaagctcctgatatgctaagtgacttgcctaagatctcatgtttggtcagtggaagacacaagccactgagcattttccagaacccgttgctgcatctattatccaaaggaggaagacaattgataacaaaaagtccgggggcacaaaatactggtgtgctcacccacacacacactccctgcccaagaaaattcaatggctgaattagaagatctatcaaatgtaaatgacaagttaacaggtgcagcccaccaacatggcacatgtatacatatgtatcaaaactgcacattgtgcacatgtaccctagaacttaaagtataataaaaaaaaaagtgctaaagaaaaaaaaaaaagaaaactcaatggctgaaatatgaccttacacagttaatgactgactacctccaatggagagagttattcaatatgccacagggctcattaaaatgcaagttttattcttaagataacttgaaacaaaattctactctcaaacacaaaggtttacatacaattttgtagcaaaacaattgatgtcataaagtaagacatcaggaggggctttggagtacagtccaattcgagaaatactacctgttaatgcaagtgatctggttctaggtccaactccatcattcatttgttctacaactaaagatcaatctctagccttgttgaatcttccacatttactgattggtgatagaaatacgtgtctttttataagttgtcacaaatgagacaaacacatgttgatatcacgtaccctctgataggatgtaatgcaaatggaactctatctccagggaacctttccccaaaactcacaatcccagattaaccaagaaaagcatcaaacacacagaaattcaggaattttatacaaagtagctcaccagtatttctcaaaactgtcagtcatgaaaaatcaaaagattcagaaactttcacagcccagaggagacgaaagagacatgaaggctaaatgtaatatggtatcctaaattggattatgcaacagaaacaggaccttagtggaaaaactcggatattaaaaaaaaatctggagtttagtttaccagtaatgtatccaggttggtttcttagttttgacaaatgtattgctaatgtaaggcattaaattagggaccttggataaagagtatatggaaactccctgtataacttttctgtaaatctaaagtcatcccaaaataaaaaaattattttgaaagatgacacctggaaaggctttctaaaatgtaataaatgatatccaaatgctagatcatgtctagagagaagatagatttgtgttgagttttcagtggattaatctggcatatagccttttatttttgcctgtagttcatttttttctagaagataagcagaacagtactattgtctatccaagaagtatcacctgttaatcaaatttatacatatttgtagtggaaagagcattggattagaaatgtgcttatttataaacctgcttctacgttgacctgcattggaaatttagatagtaactttatctaatttgctttgttttctcatctggaaaaaggggagtatgagtgcaaattttgtaagggatgaatgaagtaacatgagtaaaccagtactgacaactataaaatcatatgttcatgtgatgggttaattgtgcttccattagctttggagataatgtaagtatgaaaaaaagaataatggtcttcccaaaatgtccatattctaatccaccaaacctgtgaatgtgttaccttatatggcaaaatatattttgcagatatgattatgtcaaggatcttacgatggggagatcatcctagattatccagatgggccaaatgcaatcacaaacattctgaaaagtgggaggcagaagggtcagagttagagaaagatatgtgataacagaagcacaggctggagccatgcaaggaagggaccctgcactgagtaatgcaggtggcttctagaaggtggagaaggcaagggattgatttctcctcagagcctccataatgcaggctgccctagtgacaccttgattttagtgtgtccaacttttaaaatggtaagataataaatctgttgtttctagctactaactttagggtaatttgttataagactgatatggttagcctttgtatccccacccaaatctcatcttaaattgtaattaccaggtgttgagagacctagtgggaggtgattggatcatgggggcagtttccccacatgttgttctcatgatagtgagttctcatgaaatctcatggttttgtaagtgttcactggttcctctcttgctggcttcttctctctccttcctccatgtgaagaaggtgtttgcttcccattcaccttccgccatgattgtgagtttcttgaggcctccccaggcatgtggaactgtgagtcaattaaacctcctctgtttataaattacccagtcttgggtagtatccttatagcagtgtgaaaaaggactagcacatggagctataggaaactaatacaattactttaactatcacttaattgggatgtattgaaggataaacttactggcttatcaaagggagactgaatgtgggtctcttggaaggggtggtcacatactgaatttctgagggagaaaacctcataaattcactatatgccgcaaagcaaagctttcaagaagtggtgtggccacttttttttttttttttttttgagatggagtcatgctttgttgctcaggctggagtgcagtggcacaatcttggctcacagcaaccttcgcctcccaggttcaagtgattcttatgccccagcctcccaagtagctgggattacaggcacccaccaccatccctggctaaggtgtggctacttttaacagcttacagtaagatatggcagcaaaggaattacctaaaggtggaatttgtaattaaaaggaaagcagaatataaaaacatgaaaaatttacagtctagcaatgtgacaggaaaggaaagaatgttttcaggagaaaaatccagtggtgctgaggggtaaccacttgttaaagagattaaaatggataaaagggagtcaggtgcaaagagtcaaaaaaattggaaaaaggtttttcagaaatctttgtagccccctcccatcataggcccacaggcctgggaaaacaaaatggtttcagggaacaggcccgagttaccccgaagccactttgatatgctttctcaacattcaagctgctccagctccaggtgaggcacaaataaccccacatactatttcagctggtgctccagagggtgcaagccataaatctcagcagcatccacttggtgctaagtctgtaggctcctagaatgcaagagcagtggaagctgccaagcctgtagatttcagaggatgtattggaaagcctgggtgcccaggcagaagccttctgcagggaaggagctcctacagggagcctctactagggcagtgcccaggggagctgtgggaacaggagcaccacacttcagacaccagaattatatagccactggcaatgagccacactagcatggaaatgctgcaggtattagattccaaactgtaaaagcagcaatgtgggctgcacccagaaaaactgtgggggcagggctttccaaggacttgggagcccacttctcatatcagtatgcccaggatgcaggacatgggtcaaagaagattattttggagctttaagatttaatgtctgccctgctgggttttagacttccatgaagactgcttacccctttcttttggccaatttttgtctttgtgaacgagaatgtttacctaatgcctatacaaacattgcatattataagtagatgaattgcttttgatttcacaggctcataggtggaaggaacttgccttgagtctcagatgagattttggatttgggacttttgagtagatgctagaacaagttaagactttcgggaccattgggatagaatgattgtattttgcaatgtgagaaggatgtgaggcatggagagtcaagcgtggaatgctacagtttgaatatctgacccttcaaacctcatgttgaaatttgattcgcaatgttgcaggtggggtctaatgagaggtgtttgggtcatagaggcagatcccttatgaatggcttggtaccacctttatagtaatgagcaagttattgctctattggttcctgtaagagcttgttaaaaagaacctggcaatttctctgtatctcttgcttcctctctcaccatgtgatctttgtacatgctgcctccccttccacttgcactatgagtagaaacagcctgaggccctcaccagatgcagatgctggtgccatgcttcttgtacaccagcctgtagaatcatgagccaaatgaatctctttatctcaaaattctttatgaattatccagcctcaggtattcatttacggaaacacaaatggaataagacagcccccaacattcctacctcatagtgtacacaccctctagtatgagtgagatttctgagtataatggaatttcacttccttgagtagactgccatttctggcaaagatgaacagattttgcagatgtgaataacgttcttaatccgttgactttcagttaataaaaaggcatgttatactgaataggcttgacctttaaaagagagtctaggccttctcaggatagggagatttaaagtaagtaaggcactttcctgccaaccttgaagatgcaaactgtgttgtgaactgcttattcagcagtggcaggccataggagacaagggtctcagccctacaactgcatggaattgaattctgccaaggacccacatgagcttgacttcagatgagaatgcagccagaatgacacctttttcagccttatgggactcagtagaggatccatttaagccatgtccagacttctgacccaaggaaactgtgaaataacaaatgtgtgtcattttaaactactaaataaatggtaattcttaagtagcaaccaaaaaatcaaggcaggtaccacttactccatgaattaaggaatgaagagcatgcacagccccaggctggccatcctggatcagcaagtaaccctcaccaaccagccagatttctttcctgggagtactgtgaagaaagaagagcttacactccttacctgttaatcatgagactttttttttttttaaagtggacattttgataaacaattagacatcagtggtaacttgtaggtggttgggtataattaccttccttgtccaataatctttagattttaaaactacccaaaaagaaaaggatggaaaatagcaagctgggagggttattgacctgggtaaaccatttgtacccaattttaaagaatgcaacagatgatgctgtcctgagccaaagtagcctgctaggtccaatgctgatcagaaatggcagcaatgagttcctctattaatcattcagaggaattctgtattatgattttaagctgctgaataagtggtgatctaattcctcagaaattcctgcttcccagatctcagaggaagagtaaagtgcttaaaactatctattgtcctttatttccaggatctccatccaaatactttatgtggcccacaaggccctctatgagctggcccctgaccaccccaatctccaaccattttgcacttgtcactttgcactctggccacagtgacctttgttccatttctcatacatgtcatgcccacgcttgaggctcatgcttctgccttaaacagctggtctaagatgactctgcactagcaacgtccttccttagcttagcttctcctagattacacaaggaggctctccttgatctccagactatttctactaggctttttaaaaccttgagtactttccatttatagcatgtactacagattgtactgatgtgtttgttactattattattttataactcaatttaagggttgaggaacagcctttcactctgtctcccgagtcaagcctttgtctttttctttaaggaatattgctgtctattctgacccaagtttgtttggcaaacattgagcccctggtgcatggaaggcctgaggtatatcctcgaggaataggtggtgggaagagataaggtccctaactctagaagctgaaccatccctaggcccctcactgctcctatcttagctcatatggccctcttctctgactttgaattctgtaagagtttcaatctctcctttgattctttagggtaaaatccaaacttctagttcctttcaggtaaaatccaaactcccagttggtatggccctccataatcaggcccctgctgctctccaaggccttaattcccagagctcttcttgcactagtgaacattctcttccaagcttccaggcttttgcccattgatatggtttggctgtgcccccagccaaatctcatcttgaattgtagttcacataatccccatatgttgtaggagggacctggtgggacataattgaatcatgtggacagttactcccatgcagttctcttgacagtgagtgagttttcatcgcatccagttgttccttcactcagctcttctccttcctgctgccctgtgaaggtgacttgcttcctcttccaacacgattgtaagtttcatgaggcctccccagccatgctgaactatgagtcaattaaacttgatatctttataaattaaccagtctcaggcagttctttatagcagtatgaaaacggactaatagagtaaattggtatcacagagaatggggtgctgctctaaagatacccaaaatgtgaaagtgactttggaactgggtaacaggcagaggttggaatggtttggagggcttagaagaagacagaaagatgtgggaacttcctagagacttgttgaatggctttgatcaaaatactgatagtgatatggacaatgaaatacagcaggctaaggtggtctcagatggtgatacggtttggctgggtccccacccaaatctcaccttgaattgtaataatctccacatgtcaacggcagggccaggtggagataattgaatcatgggtgcagtttccaccatactgttcttgtagtgaatgagtctcatgagatctgatggttttatagacgggagttcctctgcacaagctcttttgcctgctgccatgtaagacatgactttgcttctccttcaccttcagccatgattatgagaccttctcagtcatgtggaactgtgagtcaattaaacctctttcctttataaattacccagtcttgggtatgtccttattagcagcatgagaacagattaacacagatgaagataaaaaaacttgttggaaacgggtataaaggtgactcttgctatgctttagcaaggagactggtggcattttgctccaccccagagatctgtggagctttgaacttaagagaaatgatgtagggtatctggcagaagaaatttctaagcagaaaaccattcaagatgtgacttgggtgctcttaaaagtattcaattttatacattcataaagagatggtttgatattggaacttatgtttaaaagggaagcagagcataaaagtttggaaagtttgcagcctgatgatgtgatagaaaagaaaaacccattttctgaggagaaattcaagctggctgcagagatttgcataaggagccaaattttaatagccaagacaatggggaaaatgtctccagggcatgtcaaaggtctttacagcagccctcccatcacatgcccagaggcctggaagagaaagtagtttcctgggctgggcccaaggcctagctgctttgtgcagtctctgggcttggtgccctgcattccagctgtggccaaaaagggccaacatatagctcatgctgttgcttcaaagggtgcaagccccaggccttggtggcttacatgtggtgttgggcctgtgggtgcacagaagccaagaactgaagtttaggaacctctgcccagattttggatgacgtagggaaacacctgaatgtccaggcagaagtttgctgcagtggggagccctcatggagaaactctgctagggcagtgtggaagggaaatgcggggtgcgaactcctacagagtccccactggggcactgcctagtggagctgtgagaaaaggaccaagatcctcctgaccccagaatggtagatccaccaatagcttgcaacatgcacctggcaaagctgtggacactcaatgccagcctgtgaaagcagctgggaggtggactgtaccttgcaaagccacaggggcagagctacccacctcttgcatcagcatgacctggatgtgatacacagagtcaaaggagatcattatggacctttaagatttcactgccttgctggattttggacttgcatggggcttgtagcccatttgttttggccagtttctcccatttggaatggctctatttacccaatgcctgtacctgcattgtatccaggaagtaactaagttgcttttgattttacaggctcataggcagaaggggctggccttgtcttagatgagactttggactgtggacttttgagttaatgctgaaatgagttaagactttgcaggacagttgggtaggcaggattggttttgaaatgtcagagacatgaggattgggagggacccaaagtggtacggtaggtttaggctttgtgtccccacctaaatctcattttgaattataatccccataatatccacatttcaaaggagagaccaggtgaagtaattggatcttggggtggtttctcccatgctgttctcatgatagtaagttcttacaaggtctgatggttttgtaaggggctcttcccccttcactcagcacttttccttcctgcagccttgtaaagaaggtatcttgctttccctttgccttctgccataattgtaagtttcctgaggcctcccggccatacttaactgtgagtcaattaaacctctttcctttataagttacccggtctcaggcagttctttaaagcagtatgaaaatggactaatacaatccctctttgcctgtgctgtcaagtattcctcacattaccacccttctccactttgagtactcctgaaccttgtcaagacccagttctaacttcctttcttcctttagccttgtagtgagatgcctggccctggaagactgctttaggctgcaagtgacagaaagtctgactcaaagtggctcaagcagtaagaagtttgttacgtcacttaacacaataagtggtgaggcagttccatggtgaattcaacccttaagtgagccatagaagatatgggtttttctcaactctccattttgccatcttagtgtgtcttttgtacccaagtttattcagaaggcttctccttacatggcatgaatagaactgtttatcacatatgcatgactatattaatgtattactctgggttctcctgagaaagagaatcaacagaatggggtgacagtgagagatttatttaagaaattggctcacatgatggctggcaaggatgatgtctacagcgtaagccgataggcaggaggcctagggaaatgttgatattgctgctcctggcctaaggcttctggaggcagaactccctttttctttggggacattggtctttttctcttaaggccttcaactcattggataaggcccacacatattatacagataatctgctttactcaaagtttactgatgcaaatgttaatctggtcttaaaaagtacctgcccaacaacatccaggcatgtttggtctaatatctgggtacgtacctagccaaatggacacatcaaattagccatcacaatgtctaaaccaattactgagaagaaagagaccagaatcaccattgttggtataaatctcagccaagagtaaccctctggggctggtaaggggctccttccctgagtatatgatggtatggagggcgaatgtgcaagcatagtcagggctctgcctgcaagacagactctagttgtgggtaaggtcagaggaaggcataggtttgagcaggtaaacaacatctgttaaacacttaggcaggcagaatcccaatactgtgttgcctcctttacatgtataaaccctgttggagcccttgttaccctgagtcatggatttatggcttatcttcctctttagactgtaggctcacctttgagtaagaatcatgtgtgagttacctgtttattaaccgcccaaacttggtgctcagcacaaggtaggtactccataaatgctattgaactgaccaaagtggggcatttgcgtgctgaattaaccttgtactcaccattgttatagagctcatatatttttatccaccacagctttgttgaagtcacagattcacaactgttatgccaactgactattatttctagacacttcagtgaggaacttatgggacgataaaactagttcagtcatatcaagttctctcctatttcacacatccataacctgaaaaaaatctcagtaacaaattgaagaacactcttaactttatagtcaagtaataagaggtaaggggtccattgtttgccacaagtacccactcagataaagtaggtcatctggagtcagatgttagagccccaggttcagttgcttaatccacaaattctcatgactcttatccttttcaacagagttggagttcccaaaagtttagaaagtggaatcatcagataccaatcttctctaccagaaagacaaaaggctttagacctgttaaattcagaggatgaggaagtcatcttttagttgtccactgtgtagaaacccttgaccttataaattcaagcatcccccatgtttcaggcatcttgagaaacccttacacacattattacactatccagtttgtaattgtctccctcaagcagataccaacaacaattgacatatactgactcaacatgcaccagacatgaacatacacacattacctccattatgcaatttaatcctcagcaaacctcacaaggctgatttagtccttatctccattttacagatgaagaacccagggagctgagctgggtaggtaacttgctgacagtcctaccaacaagaaaccacagaacccagactcaagtcccatcaactctgacttcagaggccatgatcacacttgcacacgttactgcttcccatgtagtaaggtttacatatattatctcaattaaatttgagagtgaggaaaagttattttatatcaacatgtaaggggacaataaaaattatttcctgtggttgtcttagaagcaacaaccaactcaaaatagggccttgaacactttaaagaaagaatgtgacaacagagaaaaaaacatcgaaaaatgtgaggcagacacacaacattttgcagtgaccacccagttctacccatgggcatgtcaatcactacagaggatgttctctttacaggttgtactaacttagcaagacttcttattacctggagagaataccctttatttctctaattccatactcaaaaggtacaagaatataattataaatgtaacttctgagatatcttgaatataacagatttcctaggaaaaaagtatgtaaacattctatttctttaaaagggacatcctcaattgtaagtattgaatgccatttgtcaatattgtttcacatgaacatagcttgtgccaatgaaattgttatatcattagaaacctggtcatttctagatgaattaatcaagttcggtttctatgttcactgggccatagaatagatgtgccatagtaaatttatgaagttaataatattcatttctgaggctatttggcagccagttggctttttcctgggtcacccactctcccttaccatgcctgctttcctccaactgcaaagcctcacgagtacttataattgccccatcatacaaatgagaaaaaatgatgctcagaggggttttgtgacttgcttagctctgcacagctggtgtaatagactctacagaaggacaggaaaagaagacatagaagccaagaatgaatgaggtgacctgggactctgctctttctatttgccaccaactacagagacctcaactgacatctccagccctctgctttcagtgccggagtagagattgcacactggctcctgctgagagctttatttcttattctcacatctgagcagttaaaaatactttgaaatatgtcacctgccttcccttctatccttgccttttgcttgctttttctcttgcctcgctttactaaagcagcaaaagcaagaggaccattaaaagcaagaggaccataatgagggtaagagtagtgggaggagacacagggaccctccaccttgcttctgaacgaaagtcataatataatccttgctttaatctgtattcagttctctgtcctctgcccgcatgctgacaagatccactttacctggtatttttagctgatacttggcgcgatgtgctaagtgctggccatggatgctgctaaagtgacagcatgtgttccagcagctccattgccatggtcagtcttttcatagttcctgtttcattaatgttaagaaatggctcttccttacttaaccaaatgtcagcagacacagcttcggcccttaatcatccatccccctgcccctgagggcatcctatagattgaaggacattgagactgcaggctcagatggaaaaaaaagtaatctaattgcctgttacttaacaaactttgtcttgatggagtattcattgcacacataaattagactgcctcaccttttgcaatgtaaaatcctggaaataatgctagccttcattctaattgtttttaataaataaattaaagaattaatgtgtacttacctggaacaaagcttccctggaccacctccttgtatgcccaccagccttcatggatttttggtgaattctgttgagctaaaggaaaagcaaagaagagagattaagatgatagcagagaagcactgtgtcccggctgtccgagtaagaagggtgaatatccataaaataacccttttctaccccaaagtcatactacaacagaaccttccttctcccttcccttttttttttcaaatagatcattgatcggtaaatataaaaacatttttattgaaagttctctgatattttaattgatgttaaagagatagtaattatgtatttaagtcccctgctacctgtcctcatcatcttccccatacacacacacacacacacacacacacacacacacacacaacacacacacagtgctcctgctgaaactgaggagacagtaggcagatcccatccatgtatgtccatggaacccttgttttgggagagattgaagtttgctgagggagccagtctggaaggctgaaaggtatacccagccagctttccttaggtcccaggaaaatgaaaacaagaatataaataactgtggtggaggtttttgacatcacaggcaaaaagggcagagggctcaagatattggaaaatatcgtggagatctgtaagctcatgctgacatgacctcagggaaacccttgaattcatgacagttgacaagtgaattggggcaatgccattacacatgcacacaaaccccaaagtatacatgatacataaatttatgcttatccctttattaaactacattcatatttcaattcccagacacattggaagaaaataagtgaatcaatcatatttgtaatttggctactattaatgttaaatcttaacttttttcttttcttctttaaatctggtgggggtttttttccagccttcctcttcaaagttctagggaaaagactcatcattctgagttagaaagaatgggtataagacaatgggtttgaatgcaaggctttgtatagagagaagatttactagatttctctagtttccagataagcttggactgtttagcttcaagtctcttcttatagtatagtgaagatactttttcttcctatgatattaagagccctgaggcttgtatctttgtggttgaaggagattttctgacataggatgagtgaaactgaagcccactccttctggaactgacagtgggcttaggggactttaaaaacaaataaaagagagacaaagagcttatttaagactctggaaaaaataacacctttaaatttgcccagcacaaatctcaggcatggacacacaaaagtatcctggatttcctggtattcttattgcccctgtggtgtggatagagttcagacatttccatagcccttgaggaagatcccgaggtcagctgagttggaagccaatgcatctgctctgggacagcaggcaaaggaggaagtcacctcaaagcagaagccagaaaggttctgtccaaccagggagtcaggcggaagattcaactgagactctgggaatttgcagcaccagggaaagacaaggagatttgaagtcagccaggaggtctttagacccgaccaagccaagaaaccaaatcaaggtttggatatggctgcaaaattccccaagtgggtagacaacatttctctagagttcagaaagggttctgattcttcctctgggtcttggtattgcctgactcaccctccttctcccccaattcgttagacagtcatcataggagccagaggagaatcccaaaggcttagaaacctgtgagatcagatatctaatggccctcttatgaaacaactactttgtaatgctcaccttgagtataattaaataaaattcacggacagtacaacctactaaaaaacaacaacaagaaaaccaaaccccaaacctgataattctctaaacttcagcctagctctgctagacatgtaaaatgtctcaagcctgggaaaaatgcatgtttctaagatcttaaaagcattgaactataaacatcacctaacagttttgcatcagagataagccaggactggttttccttacaacaggcaaaaacttcagagttttataaaaactcacaccaagttttatccagtcaggattactgactgtcatcaaacaatttaaaccataaatccagccttctctctttattctacgagacagtcattggggaagctgcattatcttgcatgtgtttcattaccccaaataaatatacacttagcactcaaattttgttacattaagctttttacctaattattttacaaaaaaatttttacagtgtttacacatcactttaaaaatttaatgtagtgctttaactataaataaaagaaatgtaatttataataatatatatttcaatgtgaaaatgcttgagtatgatacactagaacagagattggaaaacttgtgcctgctagccaaatatggcccattgcctgtttctgtactgcacaagagctaaaaatgaatttacatttttaaatggttgaaaaaaaagggttgaaaaaaatgttttgacatgttaaaattatattacattcaaatttcagtgtccataatgttttattgccaaatagccaaacatatttatttacatagtctctagagttgctttctcactacaatggcagagtggaatagttatgacagagaccatttggcccacaaagcctaaaatgtttcctccatggctctttactgaaaaaatttgttgagtgctaatttacatacataatttcaaaaggaaaaacaatcaatataatcaatatagtgctttaactataatacaagggggaaatacaaggaacataatgtaaaacaaaatattatatatttcaatatgtaaatacctgggcatggtgcactagaagaagataaaatgaagaagttggatgcttaattaacacagacacaaataacaacttcatattatattagagattccagaatccacaagtggcatttctctcaatggtatgtggttttccaaaatagtgaactcttgggaaagattagaacacaattaagtaccaccttctcttgatttacatgatctttgcattgctaaagaaccaggtataataaaactttgtaagacatgctttgtgtgtatatgcaaaatggagtttgattggagggtcaaataaataaaacagtttttccaatcacttgaatgtctgttgggacatgggataatttatcgttgtttctaactatctaatatgttgcagagcatagcatctctgtccccctttagttgttgctaattgccactctttcattataacaatcttaagtgccctcacccatttccaaaatattcccccagaaacggtgacatccctattgacagtcactgacctaaaggtgctatttatagtacttacatgtgctaaaagaggataaaatgaaacattatgttgaacactagaggatagcgctttgtctaagtagacaaaagatacatctttccccatctatctgaattgtagtgtcatatggaatacatttgccaccccattaccccattatatgttcaaatattttttctactctttcctgccatttgaccatatcattaagaaactttcatttctacaagggataaagcagtaaggaaaaaagagaaagcatacatgcatgttgtcaagacggcaaaaaagggaaagctaactctaataaaacctgagtaagatgactaggttctcagatttttagatgcattcctagtccctctttttatctctcttcttacatgtgcatatcttccacactcccctctaaggacaacctatcagtcgaactgaaatatcaatttaagaaacatctatctagaaggaagaagaaagaagcccctgggtaagtaagagtattggcactgacaagattatcaccaaaagcttctgttccatccagaaagttgcaaaacactttgctctttcttcatctccaatcattgcttctttggctatcacatccattcagaagcagaactatgtaagattttagcaggtaataagacaatcagaccatctgaataaagcctattgtaatagtagaactgcagagctcctgttagctgtctttgatgtgcattgtgaagaaccaaattcaccctccaaaaatcaatcagctggaagagcccatttgatgtctatcaattacaaaatttaatggctgcagactagaagaaaataaagatgatttatgtaatgttttcaaattcccttggatgctcaggctggcctcatactgtttggtaatttagaaagacaggatggcacatttaaaaaggtacctcacttaaagttctgccacagtactacaagaagtttattatagatggatctcctagagaaatacaggattcttattttaacgcctcccaccagatccttggtagtcatcttgttgttgtttacatgtgatttgaagtgagtgaagagctgattgagaattcctcagagcaaacaggtgaacagagagccgcctgagcttttacagcattctatgctcctctttgcctaggtatggatcagaattttttaatgtgcaaccagcccctgggaaaaatccaggtgtctaattaaaaaaattgtgttgacaataaaaattgtcatcactgccagaggaaaagatatacatagcaaggaaaaatctatttcagttttattcttggtttatttttcactgtggcagtttgagaactgatgattttccaaaggaaactctgaatctcagaattttgagagacaatgttcattgctccaatggcttcttatacaagtgagcagaattatcttacataattctacttctgaatgaatgggatagctgaagaagtcatcgttggggatgaagaaagagcaaagtgttttgcaactttctggatggaacagaggcttttggtgatcccttcttgcacagagaagggaacctcacttgtaagaggttggggtcttaaaacagaggtcagcaaattttttccataaagggcgacataatacatgttttaggctttgaagcccatactatttctgtgccaactgctccactttgccattgtagcacaaaaacagctgtatacaatatgcaggggtgtagctgtgtgccagtacaattttatttatgaaaacaaagagctggatttgatctgtaggccatagtttgctcagttctgtcttggatctaaaagatttttgttatccagttctgtttcttacttaaatgttcagaagtgagctactttacaaaaaaaaaaaaaaaatcagaatgttgaaatatatgggtttctaattacatgtgcctgatatctgatcagtatgtactgcagaaggtatctatcatactaaatcttttccagatctgaaattggtcaccagcatctacataaaattgaatatttccctctctccacccgatttccattgggctaaaccaccaaagctggtggagctttatataaacaaggcctacaacccatgctgggtttttcaaaccagtcaataaagacctgaacaatatcttgatccccttttgttcttcccacaagtccataaactctctcaagcaagtatgggcctgccaaccaacttaaaaaattatgttcatatacccactgaccacaaatacaggcatcacaccaacaagtctttggatccagactaaaacttcccaaagatgatgtgatctggcctgtgagtagatccctatcattaacagagcttactgctccaagtcaactaatttaactaacttaggttcagagaaaacataactgcgaaatacctccatttggaaattacagtggtctcttgacctggtgggaaacaagacttaaaagcaacatctgagatagcacagttgaggtagggaaggaaatggtgcaatagggaacagaagagccctcacaaagggatccagttggggaagggatgttgcttaataaaactccaccatcagtcaaaacataccaaaccataagcacatacattgcaaaaataagcttccaagccctgggtcagtacaattatacctgtgccaagtggtctacaactagcaaagatgaagccagatatagaggagaggcagagtacatacactgctatggttacttcattttaatgtaatggtagaagccctgaatggttgtttccctcagaaattgcatttctccactggaggaggtaattcaaggaggaaggtaccaagtctactgaccaggaaacaacataagttggaaggtaaaaaagtacttctaacattggatgcatatccatgacatcacttctttccttgcatggccaattttgtgttctaagtgggaagcaggaacattgagaagtgcatggatcgtcagaagaaacataaatgactgccccattgagctgcatggcactcactagactaacggggataatgcccttcctcaggtgcttgacttttacaacacccggaaggtatttttcttctgtgcactctctgtattatgtgtggtcctacattctaacatttagatagtgccccacactatctgtttccatatcattcatttccacctaaccgtaaccttcctgaggtcagagaatatatcttattttaaaattccattatttggccgggtgtggtggcttactcctgtaatcccagcactctgggaggccggggcacgcggatcacgaggtcaggagatcgagaccatcctggctcacacggggaaaccccgtctctactaaaaatataaaaaattagccgggcgctgtggcgggcacctgtagtcccagctactcgggaggccaagacaggagaatggcgtgaaccggggaggcggagcttgcagtgagccgagattgcaccactgcactccagcctgggcgacagagcgaaactccgtctcaaaaaacaaaaacacaaacaaaaattagcagggtgtggtagtacattcctgtaatcccagctacttgggaggctgaggcaggagaatcgcttcaacccgggagacggaggttgtagtgagcagagatcacaccactgcaccccagcctgggggacagagcgagactccgtcaaaaaaaaaaaaaaaattccattatttatgcaaaagcttagtacataataagtgccagaaaaatattgggtgaatgcctgataaacgtggtagtgaagttgtatattataccaacttgcagtccagctcacacaatccttgggaggttttagtctctatccaaagacttgtgggtgtgacgcctatatttgtggtcagtgggaatgtggacaaaagtggtttcaagttggttgacaagcccacacgtgcttgacagatggaagagtaccaggagctgacaccctgcctagggaaatcaaagccttagcaaacccacttttatttagcacaatgtgtttcatttaaaagcaaaggggaagatgtgtcatacctggaactatttacatctctgtctttctttgcttttcctgaattcgcaagacaggatgaaactcatttctatctctccatcctatgtgaaaaccccacttgccatacaaactagacaggacactcagaacattgagaattgaactggttaatgggtgacaaagtgactatttccaaagagagaagatgggtatgacctagaatcaccttgcgtgttggaccagacctaagcaagctgacaaaattatatttgtgttgggagataagaaaaaaatattgatggcgggtagcccgtattactttcatctaaaatgcttagcatgatactatttttaagaagttcaaggccaggcgcagtggctcacgccactaatcccagcactttgggaggccaaggtgggcgcatcacgaggtcaggggatagagaccatcctggttaacacggcaaaaccccgtctctaccaaaaatacaaaaaattagctgggcttggtggccggcgcctgtagtcccagctactcgggaggctgaggcaggagaatggcatgaaccagggaggcggagcttgcagtgagccgagattgcaccactgcactccagcctgggtgacagagcgagactccatctcaaaaataaataaataaataaataaataaataaataaataaataaataaatattaaaataaatagagagaagctcaaaggtaactagacttgaaaatcatcaggaggaaagtccctattatggctaattctcagcctagtattctagaatttctgcaatttgggtttaccacacatttaatatcatttctcataaaatttacaagagtcattcttcctgctgtccccaggtataccacgtttattactctctccacaccttcactctgccctttttccccccgaaattccttctttgtctactttttcttgacctggtcttactcaattctcaaagcctctccaatttacactcctttcaagaaaggtgtactgatcattccaactctactgtaatccctaacttccctgaatttcagaactttagtgtctattcctcatttgccattcctgttaattcaagaaacatctagtgagtacctatgattgtcagtaagtattctaagcattgagggtacaaagttcctgttttccatgaagttattaggtgggcgcaaaagtaattgtgggttttgctgttaagtaatggcaaaaccattaacagcaaaacccacaatcacttttgtgtaaacctaatacattctccgggagggagacagagaaaaggaaagaactgaattcaaatatataagaaaaattggagaaaagtactctgtgatatagagggtgaggtagtaaagtgactagaagaacatatgagattgtatgacagtgatggtctctgaaattatgacacttaatcagagatttaaataaaaataattggcttcatgaagatcagcagtggtagtatttcaggtggattcaaagactgaaagttggcagaaataagtttggcttctttaagaaaactaaaagtggccaataggtgtgataatagtagatacaggggagaggcaggctaaaaatgaggccggacaatgtaagtagcggcccaagagaaaggtggtggtggcttcaactagggcagtgctggtgaaaatagaacatcataagatttagatgaagcggccgggcgcggtggctcacgcctgtagtcccagcactttgggaggccgaggcgggcggatcacgaggtcaggagatcgagaccatcccggctaaaacggtgaaaccccgtctctactaaaaatacaaaaaattagccgggcgtagtggtgggcgcctgtagtcccagctacttgggaggctgaggcaggagaatggcgttaacctgggaggcggagcttgcagtgagccgagatcccgccactgcactccagcctgggcgacagagcgagactccgtctcaaaaaaaaaaaaaaaaaaaaagatttagatgaagcatggataagacttggtaatgaactggatgagagaagttgaagacttctctcaaggaaaactcccaccctttttagtctgagtgactagatgttgacagttactgagatgaccagggagactaagggagtaatttgggagcatcttcagtctcctcatggctgcaacactttctttgtatatttttaacatatattttgctattacttctctctccctgactaaattaaagctgtctcaagggtaaaaatgttgtgctttgtcttccataatgcaacacatatcgtaggtacactggcacagtgtttgacaaatatttgcttaataaatctaggaaagggagaatgacatgtgaacctccatttataaatgttatttacaagttttatagaaatattcactctgatgactaccctctatgatttccttggaataagtttaatgataaaaggtccttagaattcaaagaagagtgtaactcaataatagtggaacacaaaagaaaagggacaaaaagattacctctaatctctgtaattttaagagggtaactataattttgcttctttcaccaaacattacgtcttgttttttcattcttatttttaatgtacagatactagttattttagtagctatgccataatttaccaattattccttccctattggttatctagttgtttgaatactgcacttaaccttctcaggtacaaagcttccctcactcatcctcttttagacctttctttagcacagtgagccaaaatcacagtcaagggacagaagtatatatgttgagttactttgtaaaaaatgttataacaatctgcattgccacaaaagtataaattattatttctcaaaggaaaattctggtggtactttcaggataactacataataaaataatgctaaccatttaaatataattttgacttctgacaaataggcaacttaagaagcatcattagtctaatgaatgaatctgttctgtcatcagctcatgagatggacatttcatagaaatctattccatatttttactattatttatctgtttggaatcaggtatagatttattctctgtaaatattgtagctcctttttgtagtagagtgtatttatgtttttaaacagatggatgaaacttcagatcccaagagtacaagtccatgcctaggttcatgcagcctcccataaatcatagcaataaggaaaatgtgtatgtgctatattcagaatgctaggagcatactaataactccatttttaaactacaattggaaataaactactggtaattcctaaaatcaatgggtcagtcaattgtggggttaatctcatgtcacataaaactttctattacagctgaaatctctgaatgagactaaaatctccttgtatctctcttaagcttgaattcagcaaggctaaatgcaacgaaaagaaagaaatccagcagaattgttggtttgggaggcagtgtgaaatgatggaaaatacatggcaccctggggttaaatcacaaatttgctactaattgtgtcactttgggcgaattatttcatctctttttaaaaaatgtttatttgtataaatttaaaaagtacaaatgcagttttttaaatacagatatattgcttagtggtgaagtctaggcttttagtgtaaccctcaccttaatgggtatattatactccttaaggaatttcccatccctcatccccctcactctcccacccttccaagtctccaatgtctattattccactatgtccatgtgtatacatttatagcttatagctctcacttataagtatttgtgatatttgactttctgtttctgagttatttcacttaagctaatggtcttcagttccatccatgttgctgcaaaagatgtgatttcattcttttttatggctgagtagtattccacggtatggatataccccattttctttacgcacttacccattgatagagacttatgttgattccatatctttgctattgtgaacagtactgctataaacatatgaattcagttatctttctgatgtaattatttcttttttagagtagatacccaatactgtgactgcagattgaatggtagtctatttttagttaccaagaaaactcctctaaattgtgagccaacttgtggaagaaaaaagatagccctccctgactgaaaaaagacttaaagagcctctgaggacattcgtgccatttgtgagtcaaagtacagtcactgaagaaacttggggaacagaatataagacttgcagcaggaaaaaaactgattcagggaactcatgcaggaaacatgtggtcttcgctgggacaaagcccagagaaagcccaatgcccggtagaaaagtaggcaaaatgacctattaagtcaatttgccatggtgggacataaagccacatgcaaaccataggaaaaggccagggcagatttattttttatgtatatcatagctcaacatagttttgtccttcattctgattctgatccacacagcatttgctgagcatgcactatatgacaggtgctgtcacatacttataagtggtagagccagtgaattatgaccatatctgggctttccacaagccaaactggagtttcattatataaataaccaagaccaaactaaaatttggaacttgaattgtctggagagttgtatctgaggagatttgaggaccatccctatctcagctactacttcaatgaggatgattctcaaatttatattccccacctggattttttattccagttccatgcaagcttttcagcagcctactaattagaatactgctattttccaggacctcatgatcacaactgtcttctgcccctgtggcaaaaatagtgctactaaatctcccaatatttatttccccttcttccttaacaaggaaaactctggttttagtaagacatcacagaatacagactatattagccatatctcctttgtaggtaggtgtggacatgtgaataagttctggttaatgagatgttagaaaatgtataagagttccaggaagtgctaaaagaaaatgctatgcctctcctcacctcttccagcaagccgggatgtggacatcatagctagacttcaaatagccatcctgaaccatcatgcaaatgccttattttcagcatcaagatagaaagagctgggatccctgcatggcctacatttataagatataaataaatctccatcttatttagacttatccatcactcatagctgaaactaatcctagctgatacacacttgccttcaatacccatggagtgaagacattgactctacttctgctatagctctaatccattctttccttcacatttctactgcctagacacagatcctagacaaaggccctcagtgattacttaaatggccaattatagtggcctaataactggactcctatgtccatccatgctccctgctgtggtcttcacacctcctgcatgattatgtttcctgtttacagcagcactgtgtccatgtcgtctttcacttttgaggggtagtgaaagacatgcacagagtcttcctatgaagctcatttaccagctatttacacagccaggtccaaactcattgaccatctttcaagtctctctgcaaagcccttcaatgactccctattggttacacgataatgtgcaagtgttccaatgaaactttcaacaaactgtatggtgtggttaacttatctgttttccaaaactcatcctatctcctttgggcatcttttctctgtgctctcatggcatttattatatacatttacttataacatatatatttttcttaaataacctcttcatgagattgtcctcctgtcagaataggtgccctgtaaatgtatttggactgaagtaaatttagacatttgtttctcactgaccaaccctagtcagactgaactatctgctcttggtgatgtttgccatgtgttcacactatttacttttactggaatatcatattctttactgtatatccaaagtaaaccaatatttcaagtgtttgctcaaacactaccttctaaaaaccttccgtggtttctccagataaaagaaagctctattataatctctgaagtttcttaccatattgtatacaatttatttcatttcagtccaattcgatatgattcaattcaatcaaatccagaaaatattaatatttagaacatactcattatgtttgcatactcattctaggtctttattttggagtggtttacagtgcaatgagaaataaggggatgtctttaatatattctaggctaaagtgtatgcaatatacaaattaagataatgatagtgttgacaatgctagtttacctgcgagaacaggcaaactctaaaatctcaatggcatagtacaagtttatttctcatacatataaatttccaaactggttttcctgattggcatatagctctccaagtcagggcccaggtttcttctgtcctgtggctctgctatctgcaatacaagacttcaaaggccgctatgctgtgtaggtcaagccagaatggaaaaaagcgtggaggatttttcaaaagttgttttcctggcttaaacctagaaataatattcactacttctgcccacatttcattgactagaacttggcctctttaatacaactaaatgtaaaaggaggctagggaaatgtagtccagctgtggactacacagtggtgttggattggatagaactgagggaagtcttgtagaatccctcacacacaatgacactgaagagaatttgaaagttttccactcccttaaaatggaccaagaagaggagtaaatattttttggagaacatgcagccagagtggttataacttctaatttgtctagaatattctatttgcatttgttgtcccaatattgttataaaatggggtctcaaagatgtcccagtttagatgataaattatgtgatcatctctacacttagcagtcttttccacatgcagctttagccattttgaagactctgttgtagggcatttaggtttctaccagattatccacatattgacccatattttgtcttgtgtgtttgttgcctaaatgaaatcaagaatgtgcaccttctctcaatcctcctacaacctatctctttcccctgctttcttactcaccatttgccagccaataagtcaatacaaacaactcaattggctacagaagacacaattactagaaacctgatgacccagataccttttcttgtaattaattaattaattaatttttgagacaaagtcttgctttgttgcccaggctggagggcagtggcctgatgtcgtctcactgcaacctccgcctcctggattcaagtgattctcttgcctcagcctcctgagtagctgggattataggcgtgtgccaccacacccggctaatttttcatatttttagtagagacagagttttgccatgttggccagactggtctcaaactcctcacctgaggtgatcctcctgccttggcctcccaaagtgctggggttacagatgtgagccaccgcacctggcccctttccttgtatttaaatgctagacaaaaagaggcaaatgtcaagaaagtaagattagagaaattaaaggttcagtggtagaaggtatggagaatggttccttcttccctgaataacttttcttcaacagcaaatattcaacatgactccctatgctgtcttcaattctgttctatacagtgagaatagctgccggaatgagttgtattacaacatattgaatataataagttgtaattatcttatacagaaattatttaattacatttaattttctcctaaatatgaaacagcatgttcagaaaaatgaaaatacaacatagaattatacatgtgaaagggagatttaagacagtgttttatgccccccttatttatcagatggggaaacagagtcctagaggaataaaaactttcagaagagttaacggtagaagccaacactatgaggtctctggtgaccaaattgctgctctatcaactacatacaaaaggattttaaaaggagctgaaggccattatccttagtcataggaccagaacaccaaataccacatgttttcacaagtgggagctaaatgatgagagcacatggacacatagcagggaacaacatgcactggggcctattggaggatggagggtggggaaaagggagaggatcaggaaaaacaacaaatgggttctaggcttaccacctgggtgatgaaataatctgtaaaacaagccctcttgacacaagtttacctatgtaacaaacctgcacatgtacccttgaacttaaaaaaagtttaaaaaaaaagtcataaaaggaagaattagttgtcagctaaacagaacatctgaattcagttatttaggataattagttcagtagtcagcaaactccaaagtttttaaatatcacatgcagtcattctacctaagaaatgtgtaacaatgagattctgtcttgttggcttatagaaaagtgactctagaggagtatgtgcaccctgtataggaaaattgagtggaagaacagtttggcaagctcctgggtcacaagttacagtaagcaccttttgttcttccattattcacctccagcactctaccacataacctcaagatctactcactttgtacatcaaagacagattattacaaatgaaaagaatgaaccaataggaactgctttccttgagatccccctctaaaagttaatctttcaaggaacaaaggaaaatgcacttcaaaataggcattttccccctcaaacaataggttttctcaaatttctgagaatgccaagaacactgtgtttttgttataaatgttacatgccagcatatgattacaaaagcaagaaatgaaaagaaaaaaacccttacactttttaaaatcacaggtgaggcagatgccatttgtaagagctacaacatccttaactttcagaaaagaaaaaattaccaagcacaaaagtgaaaaatacactatagattatatacaaatctgtcaataaaatgctttcatcatggtggccaggtttcacagattatgctttgtttagaaagtaagcaattccatcattaggctaatgctccacagtgctacaattctacttcctttggaacaggcaggatcatgtaatcacgaatttcaaaagatgggcaaaaccagacacagaaaacgttccacatgctgctgatgcaaatgttgtactctaattttcaaggtcaaaaagataggataggaagattacagaagtgtgcaagaaatacaccaatattgaccttaactgagtttttgtgtcactatgtgtacacttactatggtgttcaatgaaaagatgctggtcttggtgagtgtacaatgtgtgaaagtgtcaccacagggaccaagggtgggctggcattaggtcttggacttgagttggattccaaggttttcttagcagccaaaagttagccaagagaagaaataaaaatagctaacatttaaatagcttttataggaaggcactgttctaagcattttatatatgtattgactcattaaattcacatcaactctcttttgtgttacagtattcctgccttctctgcaggggattatgttccaagaacctcagtggatgcctgaagtctcagatagctggtgactatttatactgttttttttttccctctatacgtagacacttatgataaagtttaatttacaaattaggcattgtaagacattaacaacaatagctagtaaacaatagaacagtgataatatgaaatgtatatatattttatatgacatttataatatacatattttaaaactctcaaaactataaattttatgcatgcatgcatatgtggtaaagttataaaaccatggatacatattaacttggagaaattggttctctatcttgagaagaagggagagatggggaatacaatttggaaaggatacacagattactaaaattttatttatttgaaaatatcagaaacaaatatggcaaaatgttaatatttgctattttagaatgatgagttattagtatttcacgtattctcagtagtttttccagtatgcttaaaagaagccatgattttaaaataggcaaggaaaaataggtatagttgtaaacaaacaagttattaagtaactgtaaacgtgtttttaaaaattagctagaaaaaagcaacctcagaagggaagagtaagatagataaatcagtaagatagagatcagtgagaatcttcatagttcaaaagtgataggccaagtaggcgtcaattcttaaatagatgtagttttaatgaaatcctaattcagtaacattaagggattcttcagtaacttaaaactgtttccaaaattacatggaagaacaaacaagattttttaaaaagacttacttgcagagatatcaaaactttataaagttataataactaatatgatgaggtattgataagtaattgacagatcaattaaacagcattgatgatgctgaaatattccctagcatatttttgtataagatataacggtgtaaatatcaaaatctacagcaaagaagtggactatttaacaattactaagaaaattggctaattgtaacaaaaattattatatttgtcataatatacatcctggatagatttaaaagttaaatgtaaaatgaaaattttaaaataggtaaatagaatataactatttttttctgtaaatacagcatctttaagttaatgtaggttcctctttgtcctaaacctaagggttttttatgcattctaggtagaccagcagtctaactctcacagaacattcagagaaattaaaataaattctgcccacacccctacatgagatgaactggaacgtggtgtaaaactgggttacagatctatgtagattatctgatgatctgggcttctttaaaggaaagataagtggataccccagggaagttaccatgaaccaaggaagacaaagatttatgtaaatagctgctgactacacactctttttagtaaacttacaaataacaggattttgaacaatacagcattagctaaatatattatggaacactcacactaagaaatattaaataatgttttttgaagattatgtaaagacagaaaaatcctcaccaaaaaatactatctgaaaaaaatcagcatataaaaaagtatataaaatatgatcctaattttgagaaggaaaaaatatctggaaggaaatacaaccaaatgttaagtgaggttattttcaagtgttatgatgatgaagtgaagttaattttctaaccactattttccaactttttgtaatgtgtattttttatgattaggataaaaatggtataaaaatttttaaaaaggcaaaacctcccactgtgtgctgagcttccccgaaccagtgaactagatttcactgaggaccctaacaacttctcagtggtaaaaataatgagttttcccaacattaagatttaattttcagtggtatagatgggagcaagaaagcccaaaggacattgaccgtttctgagcctaatttctcactcccgcacattggccactgtgctgctggctaaacaatttccccccattctcagttactcgttttgctcatgcataaaagatacatgttaaatcagagaaaccaccctaagggtgattgatgaggaggacagcctggagagttacttcaagctctaagctcagggaacttggtaacactttggactcaattttgatttgcagttgtacaagacaatgaacattgctgttggagggggaccttgctgtatacactagaattcaatttagcaggaaatggcaaacactttagggaacccaaagaccatctccatgatacagggtttcctaagaggacttcctaagagggctgcacaatgaaacgaatgtgccctggaaagacctgctttctgcatagccagtgaggttttataagccatgggtaaaatgggataaatgttacctttgaaaagtatatgccgcctatgctcttcacatagggcttctaaatcactacacaaacttctacataccgatatatctttctgtgggagggatgagttaaaacaacctgtctttctctttctctttctccgcctgtctgtctctgtatttgtccctgtctccttctgactctctcctttgtctgtttctccctcttcgtgtgcatttctatgagtgtctgtttgtatttttctcagtgtctatctctgtctcattctctgtataacattccttctttcttgtccacagaattttttcttaaaagggaaggggactaatatagcatttactttttctggcactatgttactttatatacactatttaattcaagccattcagcaatcctaagaggaggaaaaacgtttttaagaaaaaaccaaaaacttttcttataaatcaggaaactgaagcttacagaagaattttgtccaaaggccacctattcacagaaaatggaagatggctgttcggtaatgagtccccgtggaccccggagtaacacccttcttagtatgtggacatgcttgcagagtgcaccttctccgtgatacaaggctattcttcctaatccatgggctgggaaatccatggcctaagatgcaaactgacctaacccacaggtataaaggcagcagagcaaccagccctccatccttcccacctccattcctttcctgccagctctctttttcacttcctgcaacctgattttcattcctgagacaaaataaatgtatccttcacagagttttctgatgttgaggacccaatgtccttcactcagtccttactgtacttgctctctgaggattgaataccatggagctcatcttcttaaactgctttttccttagcttctgtaagataatatggcatttgatttctatctattctctgtaaaaaataaaaggtaaaataatttgtctatgtaagtcctcacttaatgttgttgataggttcttagaaactggaactttaagcaaaacaacgtatagtaggtccttcaataatatcatttccttcaatgtaatgttttatcatgttgacgagaaaaaaaattggttttgtttatatgttgtttcacttaaagtcagtttccaagaatctactggtaatattagtgaggacatactgttcatatatgtatatatgtgtagatacatatgtacacatacatatatcagggaagtaaagaggacatagttggggaaaccaagcaacatagagatgggcacatactagctgcttaatatattaatttattgaattaatgaattaaccaactcatagaattatctcccaatcttcatctaagcaaatctttcactccagccaactagaaaagtgccccctataaatgcaatgtgttttcttgctcacattcatagacctcatctgaggtttttccctctttgtacaaatgctatttacatcctgaccgaaaccatcaccaacccatggaaaatctcctttgttgctgtgaattgaaacaactcttcctctctaaatgtttatgacaatgttcacctatttagcaatttatcctttgcttccctgtggggtttttaatcatcacttaacttttgtgttgttatttcactcctctcttgttgtcattgtctcttcaactaagagaaccatacttttgtgtcttcattgtgcccctctaagagaagatgctagtataaataaatgtttaatttattaatattttgaatgcaagagaccagtgctcctaagtattgctagcttttatgcagtagaatggaaaagagggcaataactaaattttctgagagtctcctctgtactagatgttttgcaagtatatcttgtttcattctcaccagaaatttattaggtagtttttaccttatttatacataaagacactgaagttcaaagttacttgatcagggtcattcatctggtaagttggaaagctggggcctgaaagcaagattcagctctaaagattacatccttaagatgagttcatgtcctttgcagggacatggatgaagctggaaaccatcattctcagcaaactatcacaagatcagaaaaccaaacaccgcatgttctcactcataagtgggagctgaacaatgagaacacatggacacagggagcggaacatcacacactggagcctgcggggtgtgggggctgggggaggaataacattaggagaaatacctaatgtaggtgacgagttgatgggtgaaaaccaccatggcacatgtatacctatgtaagaaaactgcacattctgcacatgtaacccataacttaaagtataatttaaaaaaaacctaaataaatgtataaagcaaaaaaaaaaaagattatgtccttaaaattgtgtcacactaaacaataaagtttctagaagaatacataggaatgtatcgtcaggaaactggagtaagcaaaggcttcgttagcaggacactaggggaaacaattaattggacttctttaaaattaaaaacttctgttcacctaaagatatcacaaaagagtgaaaatgtaattcatgagttgggagaagatatatacatccaggcaaaattattgaatttagaatatactgtatccaaaatatactcatacggtatccagaaatactttaaaacttaatagggaaaagacgaagtcttttgttcatttatgggcaagagacttgatagatccttgataaaggagaatatccaaatgggcagtaagcatatataaacttgctcaacactactcaaatttaaaccccaatgaaatgccactaccaccaccagaatggctaaaattaatacaatggataatagcaagtattggcaggaatgtggtgcaactggaattctcatatactgctggtggtaatataaattagtatagccactttgaaaatgtgtttggccttatcttctacagttgataaaaactacaaatttcatctactctatgacaataatttcactcctaggtatagatgcaaaaaatattagtgcgcatgtctactaaaacacatgtacaagaatgtttacatcagctttatttatcatagccaaagactgaacaacccatatgtctactgacaccagaacagagaaacacatttttgtacattcatacaatggcctacaaattacacattaaaagaatcaacaattcctaccttgaacaacataggtgagtctcaggttgtagagtgaaagaagccagacacaaagagtacattctgcatgatgttatttatatgaagttttaaaacaggcaaaacaagttcatagttataaaggtcagaatatttttttcctctattgggtgagggcgaagggtgttggtaattgactgggaagggatgggggtgaacctatggagtgatgaaaatgttccatattttgattggtgtgatagttatgtagtatatacatgtgtaaaattaattcatctgtacaattaagatttgtgcattttatatgttaatctcaatttaaaaagcaagtaatcaaccaaacagcactctgtcatggcaaatggaaatatatttgtaactataccagtttcctgaataagaatttatatgatctatccattttatattaataattaaggtccaaggaaaacatttgtctctcctgacactctggtaagattccctttatcagataataaaaccatatatcctgtcctgtctcacctgtgtcaggaagcacacacgaattcaatactaaattaatcattttagcctgggttttggtatatttactttcattctctctttctgctcctcactccccaaactccagcctcacttcccttctgatgaaaatgttttacgtatgccgttcagtacctcaaaaccatgttggatgtaggtaaggatataacatgacgtgctaaatgaacaaggtgcttagcgcagaaattgaaaggtggtataaaaggagagtaatatttggtgtcagaaaactttagcttgagtctagatgtccttttattacctgtgaaatcttggtttcaatttgttgaacctttgccccctcacctctaaaaaccaggctagtcctatttacttcccaggtattgtgaatatctcttgggataatgcatgtggggaaagcaccatgagctagaaagcatgggtactaaggttcacctggctgccaatataggggtacataggctgacataaagaaagcagcaggcctgagtgtccactacagcttgattatctcattgctctccatctgttgctttttctctgacccacatttcctttctggaacttagtgggtgttctcactaatgaacacacaccttctactgtcaggaagaaggagtctcaacaagaagcctgtgagagtgtcttaaaaggcttggctggataatgaccaaggaacttgaaccactggtctatcttgttttccccatctttagagaaaaagttcctggacactctggtacatccgattacagaagaaagagataagaattggctctgaggacagagcgaacaatcttttatcccccatcctatcaacggctatgacaattggtatccttcagtttttaagaattactacatatcagattccaagaagctcaggcaataacataatagacaccaatgtctcaaatatccttctggaagagccattgatattttgctaaatgtactaagatttatttcttgaaaaaaataattacagatagggttgaagttctactctgtatgctttctctttctctcccctcccttgaggcatctcatttctgaggttggtcaaagccatttgcaaatatgcttttggttttctatccaaagtcttcacataatatgctatgaggtatcattaaagttatagaaaatgcatctagccctatctatcctttgtaacttgcttttttcatttatcataatgcagatacaattcattcattttaactgcaatgatacaattcattcattttaactgcaatgtataaatgatcatggatttgtccatttgcttacaaataaatagctggatccaccccacttctgccatttttagctattttaaattatgctgcaatgaatatccttgtgtagatctcattgtttatgaactaggatatcccatttttaaaaaatctagaatggatgctgagaagcaggattgcttaattgtagagtatgcctatcttggaacaaattagatctctctaaagtggttataacaatttaaaacacatcttttggccacagttggtataatcacatttttaaatgtgtgtcaatagatgggtttgtaatggtatgctactgcaattttaatttcccctgaatcccagtgaggctgaacaaatttttcatacatttatggctgttggaatttacctataaacagtcttgtttatatattttgtacatcaaatggtttattagactgtttgaataattctggttccagaacattttacttctcccagaaaagctcaaccaatttctcttgcacttctaattttcagaagttttttaaaattgaacccaaatctgtattgttgatatttctatccagtacactggttttgcactctgggttgacacggaataagtctgacctttctttcatatcactgccttacatatccatttgttcattgacttattcattcattcattcacatacttactcatttattcatttcagcaaacacaaattaagcactcaccaaagtcaggaataaaacctgggtcaagtcatcaaggagacacagtttgatagaggagacagacatcaaattaactaatgatacaacatggtaagcccagtaatagtggtatgcacaagaaacaaaggtaggacagaatgaggatgactttaacagatattcaccctctcaccacaccatttattaaaatagacatttctataaaacttgcctgcaataagtatccactgtcatagtcctcttgtgtatctttcccccgtcacctggccactcttccagcggaggccccccaatatttctatatcaactaagggggtggcagggtgtgggagatacaccaggaccttatgcctgtgctgcagctggcctgttttgatgggttggtgcccagaactgctgttacatatttgactgtcatatttggaaggagctactttcacttgtgtcctggttacaggtattctcactgtcccaatcactctctgtcacatctatctttatccttcatacatgatagtgctcagaacaatacataggttcatggaaaaatagtctaagcacagtgtttatcaaacctcagtgtgtgcatgaaacatctacattttttgaaaaaattgtggatatgactcagaaggcctgggctggggcctgagattctgtatttctaacaacttgcctggtgatgccaatgctgctagtctgaggaccatattttgagtagcaagggtatttgcagcttaaaatgtagttgaaccaacaccaacataattctgacccaacaataacgacccagcccagtgtcaaatcagttatctgacaacagtgtcacactacagacatgtactgacctaagtcctgtactgacctaagtcctctaagtctttttaggaagagcaaaaaagtcaatactacttcatcttctatttatggagatatgtttttgtatacacgtatctctttgcagctacactagtttggaggctagtgacgtcgggaggggcctgtgatacctacctgttcctctaccgggccagtccatagagaaggtatacctagcatgcatccaacaatgcacctgagcttctttagctgtacaagggcccattgctatattaaagaaatcctccagggagctaaggctctaagacacatctttacaatgtttcattcattccttcaacaaatagtgcgtgagcattcgtacctggtggtcattgctttaggtactgagacaaagtgcttcctctcatggaatttatattctgctggggtcagatgtgctccaaaaatacatgaataaataaacaagaagaatttcatatggtggtgttatgctgaaaataatagcaagaggtgagggtggcagggtggctcctatggactgggcagtcagaatgatgtcatttaagctcagacctgcattattagcaggaagacgccatgtatagataataagaaaaaaaagggtcacaggcaggaaaatagatggtactagaatttgaagcaggaaagagcttaatatgctcacagactgggaaggtcagtaaactgcctggagcataatgaatgggggttgggatagaacacactgacattgaaaaggtagaaaggggttagatcctgctgacctacataagtcagggtcaggagtatagattttattctaagtgtgatatgtagccttagtgatcattgaggtttttggattttagaggtagactctgtaaggctccagatagaattactgggtagctactttttctgtttgtttttggcatcagcagtcagttggctgttggggtcacttacttggttggggaaagttgttgtatgggtgatgtttgaggagagaacacaagagtttcattggatcatggtaagtttcagatggctgccagtcatccacatgttggtggcaagctgactgttggaaataagagtcctgaagactcaatgtgctgtcgggcaagagcaaaagacctggcatattcagcagatggttcttaaggcatatccatagggaatgtcatactaacagattgatcagaggaggaaagaccagcaaaggaatttgagaagtggccagttaagtcagaggaagactgaagatatggagtcttgtgaactcaaagaagtgtttcaaggaggcagggcctgactatatgtgatgctactgtaaggtcatggtagacaagaacaagggaaaaccctctagatttggcaatacatagatcagtggtgaccttgatgatagtggccctagtggagtggtggggaggaaagtctgatcagataggttaagaatgtcagaaaggacgtaaaaataatgattgtagataataagctcaagattttatgtgaacggagtgaagagagtggtagttggaaggaaataagagatcaattttttaataggagaaccaagagcgtatttgtataataatggaaatggactagttgaaagggataatgtgatgattcaggaataaaggaagatataattgcagaagcaaagaccttgagaaggtgaaaaggaccgggatccagaccaaagcattaggattgatttctgataggcacagagatatcatcttcatagaaacagtactgaaagagacaggatagagatacagatagtttatttgggcagtgaaaaggtataggagtttctgtctgcctcaattttcttctatatttgagaaaaaaacataacccattctcaagggcaacaggactctcaaaaaaaacagacaagccaacacctagtgggaccccacaaactacaagtgaaaacaaaaacaaaagcaaaactctacatgaaagtgggcaagaaagaggtaagcaacttctgaacagagaaatggggagaggaaatgtgatatcctcaacagcataaaaatgtcttaaaattacggaactacgtcttatcctgtctcagttctcccacaccatttctgacacttaaaatggtgccattgacagccttctccccatatctggtctctcatgctggtatgctgaaactctcactcctcctccaaggaacatctcaaatatatcacccccatcaagcctttcctgatatccatcagtatcacccaccatcgatcttgccctactttgatttctcacagttttattacatgcttagtaaggtctttcttgtactgtattatagctttggtaggctttttggaggaaataatgatatcttcattgtctatgatgccttctaaatatttttcgctactctgacttacagtccagatattagctaatcctttgcccagataaggcttactcttttttggttctaagtcaatgtagttgcaaaattcagaccttcacatattcccccaagaattctagtctcgacaaccctgagaataatgtaagctgatgccaccattccctgctggcaggatttttttgggtacatgttgatggcctccagtaatgagatgcaagtgagagctaagtccccttctcccaacccagccactaggtgagatgctgcaatgaaaacatgtatctgactaatttctgcaacacatacatccttttattcatgagcatgtacacaattttttttctcatatgagatggcgaagcaccatctctgttaagacactttcaaaaggacccttgtatgaaaagattacttgaggcaaatgtgacatcatgtcagcagcagaattcagccagtattccagttaaaatcagccaaacaaattctctgttaagtggcaggtcataagaattattaaatggatccctaagcgagggccaccactagaaaggagcatacagcttttggacttgctagatcctcataccttatttattcaagggcagctgttcctgtgtgatgcttttgaccaatccacatgtcttgaagaccatccatttcaccaataaaaaattataatatttcttatgttaaccaacaaagtctctaggtagagatttaggtaaggagagttgatcacttgtcttggctgccattgaacggttgactactaataagtttctcttcagtgctaccctctggggtgtgtattcttctcaagggcacttcaaatgttagctattcctagggtatagataaaatcaacttaaacatatatagcatagggtttaaatagaaatattcaaaggtaaataatgaacacctaaattaataaatttctccctcccttttttctttccttccattttttttctctttctcttctgttcactttttccttggtcttccatactgaagagtgattgagtcattgtaaaggatattttggagtgcatattgtttccactaaaatttaaaatccacagacattgttgctctccaaagtccctccttagccaccctgacaccagcagctctgctttcctgaatcctgtcccctccacttgtggaatttcaaattactttcccatgtattctaactccctataacactctctcagcttttaacttgccaacctaaacaccaagattctcaggaaaacagagactcctccagagaattctggccggcctccttagaaggctgtttgtggaacatctttgtttactcaaacatgtccttgaggtctctaccttttctcatctccttagtaaacaactttgctgagcgattatttcaagcaaatgcaatgttgttaaaataaactaaaatggagaccaggcatgaaaaattctagagaagacagagataggccttgaaagtgaccttaaacttgtttgaatcgcaaccacaagtggaacttaacttgagctatttcttataaatgccaacattaagaaacatggaactttaactgaaccaatcaaaagctgccatctaacacagagttatgtaactagaagctttccagtaggacagacaaaacgaggcaactacataacccaaaccaatcagatatcttccttgccttgcttctgtgttcactataaaagcctccctcttgggcttcttcagtggaaccctgaaccacttgctgcctgattcatgagtcactgtttgcccgaataaactctatacaattttattgtgcctcagtttatcttttaacagtattcttctcaagaatgtaaataaaattttcctcaacctcattactaagaatgatgtttcattcttagtgtttaaaccttacaaaaggtccaaaattcatgtcatcccacatatattcttatgtacccttcaccctctacggaagtcacttactgttgacatgcatatacatcctcaagggctttcatgtattagattttttttttcctgctatgtgcacgcacttctcacttctttttgttgtccttgggtttacacttttagaattgtctcagcctaaggtaatcatgagaataacctggagattttgaaactacaaagaacgtcactagatcttttgaatcagagtctgagggttatacccagcacctgtgttttgtaaaaccatcttccctggtaatttttgtacacagccctaagtaagacttctccactatttagcgcaggaggatagcgttattgttttctttctttgggaaccacctgtggttagataattaaggcttttcagtgaccacaagctctggcacttgctccaggatcaactccctgccagtcactctcccagtcgtccacagcacaatccacagtgacttctaaggccagagaggcaagtttgcacttgttcacacatcatttttataccattgcttgtcacctgaatctcattcttgctcccccacagggagctggtcaatcttgctgaagagtgagtctgggtaagctccctcctaatcagagcaactcagtagtctgtgcctgtgcccgagactgctgacccttaaattagggaaactcaacatttgctagcttccctactggattaggtggccatgactgtttgatgctgcagctaggatgaactagggtgattttggcattgacgtttgtctttagtcacaaagctgggaactactgttggtgattcatatacacaaaatgaagggtgcagttcatcgcatttcttcttccaaggctctcatttgtttcaagttcatagcccaagtttctccttaccgcaagaggcagtccccccagcacttgggtggttaggtggatgacatgacttcacactggcatgggcgctgcctcacaccttagatgtttccacatgggcagactgatatagtgaagcaagctcgggctttggagccagactgatctaggttcaaaccccagctctgcagaacctaaagttctgtggccttgggccaatgaccatactttactgagattccatttgcgatccataaaatgaggataattaaaaaattaataatacctgcctcacaagtctaatggacttaagataatataaggacatctgttaggcaatcagcacctgctccttcctcctttggctcccatacaaaggagggtggggtccctcatcacacctcctgccttttttttttttttcttctctgagacagtgtctggttctggctctgtcacctaggctgaagtgcagtggcacaatctctgctcactgcaaccttggcctcccgggttcaagccaaccctcctacctcagcctcccgagtagctagctgggactacaggtatgcgtcaccatgcccagctaattcttgcatttatttgtggagactggctttcgtcatgttgcccaggctggtcttgaattcctgagctcaagcaacccgcctgcctcagcttcccaaaatgctggcattataggtttgagccactgtgcctggccctcctgccttgttcttagctgtctttctcaaacgagggcacaaacaacaataactactgggagaactttgtcaaagcatccattctcccacccctagatccaaccctctttgaaatctccaaccttacctccttctcctcctctcttggtgccttcctggaatgtttcccaggtgctggactccacggcacaacaagtgaagcactgagggtactgacttaaagaggcattcaccctctcccaagtcctaagcactgactccttgaattgtgggccctgggtgcctctcgctagtcttggccctgctagggctttccgtcgattcatcatttgctgcacggatgacaaccatttcttttctcccagtaggttagataaagcttagattaattaacagtagagcttaggcaacttttcttgctggagtacttacaaaaaaataaggggttcctgagagccacccagactgatgaaagatcagcctagctgcactttagactcacctgaagtctagacgctcagcttccagggattctggttccattaggctggggtagggcaacatgggtaattttaaaaagcttctcaggtgatttgtaagatgattagggtccaatcactggcccgggctcagggaatctgtattcaagctcccagatgattcctacatgcattaaagcttcaaaacccactggcttcctattaaactctccagctctgaaatcagacccaggttcaaatcctcatgtttttttgttttttttttttgaaatggagtcttggctctgtcgcccaggctggagtgcagtggcacaatctcggctcagtgcaagctccgcctcccgggttcacacaattgtcctgcctcagcttcccgaatagctgggactacaggcgcctgccaccacacccggctaattttttgtattttttagtagagagggggtttcaccgtgttagccaggatggtctcaatctcctgacctcgtgatctgcccgccctggcctcccaaagtgcgtgagccaccacacctggcctcaaatccttattcttgcactcactaccatattactttgagcaaggttcttacccgcttcttcacctacaaaatgacaataataacagtaccttccacagaagtgttcatggggattaagtaagatggaaataagttagcatactgtatgacatacagcaagtcccactaagtgataccttattaacatgctaaagcatttattgagcccttccttattgtggattagcattttatgtgtgtgtgtatatgagacatagtgactcatctccaggcctgtgactttgggctacttaacacctttgtgcatcaggagattataaacagcataaaagaagtaagtcatgaggattcaatgaaatattgcatgaaaagtgtttagtagagccctagtacatagtaaatgctcagtaaatgccagctgttataattgcacataatagtcaattttcaataaaagttgataattctggagtattcttaatacatttcctgtccaagaaaatacccagcttggctcctaagtaaagccaaagatctttcttgtgcttatttcttagattttgctataggggctggcccgcatcacgggtttaaggaaagttttctaaatgcacaaacgaatggattactagggaatttccacttgccttcaccctccacactgattttgcctgtgactcaagatcgtgaaagtcttcctgaccacggggccattcattccgtttccaaatgctgcaacccgcccatggctctaatcaagagcagaactgatttatgctggaagtggagtgagccagggaggtggaatcctccaccgctgatttgtttattgctgagtccttgaaaattgaatagggaggaaaagggaggtgtgagaaatgagttaagagctactccccatcacatttgataagaggttctttcactctggaagagtatagcttttcgttgttgttaatatgaaaatgctataagtgctacaaaaacacatgtcaagttccatgcctgtcttccacctgatggccaccaagagccctgacaatgatggaatagcaagctgcctggatttctagggcttaattaaggaactgtaacaggctatgctacaactctgtaatactccttggtaaatgactacagtagataaagaaaaattggtttcctccatttagcagatattgattacagggtttgttttaaaacatttagactaacttggttctttgttttatttattcacttccatgcattaattgaaagcccacggctcagattgtattaacttgatcgccctctactggccacatgctggagtacatgcctgtttttgacctatcctacaaaaactacagctatttttagaaagtattggccttttcaagtcaaacatactttttcaaggtcaattatgagtacggtggggagactcctgtatataaaaccccaaattgtctactctgtttttgaatattctgcttcctgaaagatctttcgattccatatatttgataatttaagaagaaccatgaccaggagccagaagatctgagttcacatgggcctaccctctcatctatgaaaggagaaggttgaggtaggacaggcacaaggcccctttttaatctctcaagctggggcggtagggactgcaccccatgttagaagccaggtgccctgcgatcgagtcctaatttgagatttagttctgattcccttttactcttgctataaagtgaataaggagggtatgaaatctccagggttcctttgaattccaatatgttaggactcaattcatactaacctcgagcacatataagtgacagggaggaattttcggaaagataattcctcttaaaacccctttaaaaggttattttttcttttttcctatgacaattttctagaaaacataggatttattcctcacaaagctccccatacttgtagctgaaactattgtctccacatgaacagtttgaataaactgtaacatttttattatctagaacataggagagaaaaaaatccaacaccagattctagatggagatttattgcagattcttataatttgggggggaaaataaaatgatgaggcccttcaagtccaagggagaaaagctggctctgagtccctaagcagaaacattttttaaaagctgctctacttccctccacaaagcagatctgcaatgtgatcggcaaccttttgcttccatcattttggtggattacccagtccctagacacagttcaaagaagacatttgctcaggtagggtgagcacagtgtaatcctccatccttgcaacaaacattaagagcatttaagaaagtcagagcaaggcaatgctggaagaacttcttttctactatgagaaaaagcagaaaatgccacatacaacaatgtaaaattgattgacttagcaataatctggcctagggaaaatttaccaagtttcaagaaaggaatttgtttttaaaaataaaacgtccttgcatttaattagccacgcacttattctattataagaataagccaggcactattctatcaggcactttgaaatgaataattgtatttgctttttaaaaatcaatattaggtgtatatatatatttttaatatatttttatatatatattttttatatatatatatatatatatatatatatataatatgtatatgatggaatactacccagccataaaaggaatgaattaacagcacttgcaataacctggatgagactggagactattactctaagtgaagtaactcaggaatcaaaaaccaaacattgtatgtcctcactgatatgtgggaaataagctgtgaggatgcaaagacataagaatgatgccatgggccaggcgcagtggctcacgcctgtaatcccagcacttcggaaggccaaggcaggcgaatcacgaggtcaggagttcgagaccagcctgaccaacatgctgaaaccccgtctctactaaaaatacaaaaaaaattagctgggcgtggtggtgtgtgcctgtaatcccagttacttaggatgctgaggcaggagaatcgcttgaacctgggaggtggaggttgcagtgagcaaagattgagccattgcactccagcctgggtgacagggggagactccgtctcaaaaaaaaaaaaaaaaaaaaaaaaaaaaagaatgatgcaatgagatttgaggacttcgggggaagagtgggagggcgcaagggataaaagataacaaatatggtgcagtgtatactgctcagtgatgggttcaccaaaatctcacaaatcaccactaaagaacttacccatgtaatcaaacaccaactgtaccccaacaagttatggagaaataaaataaaatactgaagtacaaactttttttaaaaaaaagtgaaaaacacaggatctgtatattaaattacaaattgctgatgaaagaaatcaaagagacctcaataaatggagacatccctactaggttcatggattggaggactcaacataataaagccatcaattctccccaaattaatctgtaagtttattacaacagcaacaaaaccaatactaggaagggagtcataggggcattacactcatgttgtagatgataattaagaagattatgtatcttccctacaaagaccaaatcccacagataatagtactattttctgatatttaaaattttgctctaagagattttcggagaaaacattcaagtccttctaaggatgctagggctgtatggatgcatacatgtgtatcttcttttccgaagggacaaaaaacaaaataaaccacatatttccaggggaaaaccaaagcaatagagtagagagaagaaatgtttgagtttgattctgcactaacttttccaaagcaagagttctattcagtgtgagtaccttccagaacaaggcactgtgtgggaaacatcgtagaaggctgtaatctttccccagatcatttcctggttggggaataaactattgcagattaatgcagattacattgtgttctctctgaggactgtagacaaaatagtggctattagtttctagggactggaaattaatagagagggagtttaatgcaagtcacattcaatcccatgagcaagtctttaaaatctatcaggtctagttcaaaaataggtctcacattccattattctctccatctccactattactatcttagatcagtggtccaaaagataggaacaggagcattgacagtgtgtttcatgactttcaggcagtcaatttcagagaaggcaatagcaaagaagaatcatgttcctttctgacttaaagaatttgagaccctgttcctattatctctggaatctagaggcatcacatcccatgcatcctctggcatcatgatcacagaagttttatctgcaacaggtgtatgaggagcttatataactgtgcatgctcataccctcctaatctcatccgcatgactattctgcaaacacaaagcataaaataccccagactagacaccggcatgagtccagctgaaaaaattgacagatcagcatggtctctgtataagcatgtgataaaatctctacagtcatgttttccaactgaatgctagctctccctcccctggatccccataacctttcttccattctctgataatagcttttcatttgctttctctgcctgttaaactgtaagttcctgtgggtagggagcaggtatgatcacgtgccttacttaactcagacagcaggataaaatgagtcctctggagtctcacagacctatcctggaaggccaactttactaactgtagggctttgggcccttaacctctctgagcctcaattccaataggaaaacagttattgtaagtatccaatgacatttatgcaaatggcttagccaatgcttgcccctagcaattgatgtgataaataataccactgtatcctaggttgggctctctagagttaatatttgagatggagatttgggtgtctgcgatttacctgaaggagaggtctcagaaagaaaggagttagggaagtaagacagagtcgggggaggagctaagctgaactctagcttcagcctgatcccacagggaggtctgaagcataaattgcaccaaaaggttggttccctcttgggatgggtccagccatttctatcctccccccattcaaaccctccatatccattggttactggctataggctgccttcctttgtgggcacagaaggacgtatcctccatggccaagcagctcccatggccaaggacagttccacgaagaatagggcagttgtgagctgacagtaacctatactcacagcaaccatgtaagggagatctgggaaaggcaccagaaacacccactacactattattatatttgtatcattctatgtccaaatatgagcttttgacatgacagggactcaataaatagttgaactaaattgaagaatctaaattgcatagactgtgcaaagccagcatgaatagcttttgtctcatccgcatattcaaaatctttggagacagctgtcacattcctccccttcactggccctcagaattgccaagactacacaaggttgtagcacacccctaaattcccaggcacactgattatgtatgacgctcacttaactgtaaattttcttgcttctcttgtttcagagattttctggtgctaattacacctacgcttacatccaaatatttcattgtgatgcagattatacttgtaagtgcatgaattattctttgaaggcaaaaggaattaataatgtttcaccattcactgtgacatgtttccaagcatgtaagtgacaggtgcacttttaaataatgtactttttcttctccttgacaagcaagaacccagatttaaagagatagaagatgtgaaggattgtcttgtggatctactgatgtcatgcttgggtttccatctccatcagcaaatgaacgaataagtaatgtatacaggtcccagtacctgctcagattagattgtatcagcagccttacactctgaaataccattaggacaaatccccaggcactcagggatagaaagagagagctgggttggtcatcagtaggaatggaggaaagctttttgtaaatcacaaggtgatttataaaggtcaattattagtattaattattctactatcaactttatgttcagtgctcctggctctacctacatctccttctgaattaatcagccccttccagagatttcacatctgttcaggtgactagggacaaataaaaaggagcctaaacaggttgaggaacctgctcttttcttgtacttttatctaatactctctctactggtagagactaaattgaattcagaaaacaaatctagcaggtggttctagagccttaattgtgagtggccaatagataacatataaaaggaaatggggattttatacatcatcatcaccctcatgaagtcaaggaaatgaatgcctaaagactagttgttgaatttcagaagattcatgtgtgtaaaacaagtggacctactgccccaattcaccagatttcattttagttctattaggatcatgaggtatttgagaaaagaagaaaaagaaaaaaaaaaaactcacaatttggtatgggcaatacaaaaagttctctctcacatgtattaatacatccactttaatggcaaaaacagactttaattttggaaaggaatatagctgagctctagattagaagcccataaactatggaccaaatctctcttctgcctgtctctgttagtaaagtttcattacaacacagccatgcccattcatttacatattgcctatgcttcttttaggataacaacagtggagctgaataggtgggaaaaagaccacgctggccacaatgccaaaaaatagttatatttggccctttatagaaaatgtttgctgactcttgctctacagccaaactccttgatattaaatactggttctatcacttattagctgtggtactttcagaaagtttctcaatgtaatcatcgtgaagaaatgaacactatctaccacttagggttgataggaagattgagtaagtttaaatatccaaagtgcctagaccagcatctagcatatattcaggattcaataactattagccattattattataaacagcaagaacaaatatccttctccccatacgcattgttggctctcatgccaaaagaaccacccagaggcccttctgccctttctcatggataagtttggaatgtctctccaatgttctgaatgcacatagatactttctaggtattctagttattctatagcagctgcgcagaagggaagccatttcttttcttttcctctctttattcttggaagatggcttcagttaaaaagctcaagcagagatttcaaacctccttcttctgtctaaaatatttaatggccagcctaacaaccctggcaaaacaactggtttgttttcacaactcacagtgttttttcatctttagaatcaattagaggttctaaagatattgtaggatcaaagattggcttagaatataaaccttgaattcctaagagagcttacaagtttgtccagattagatgctcaagatgaacagagggcccagcctctgtaaggtaggaatgtaaagtggggataaaattagtagaattttgaaaaacccacctttttgagaaatacagatgaataaatagattacacttctttctctctctctttcacttcctttccaccttttccttacggccaggttaataataaaaaggtcagtgttctgagttctaaaaaaaaatgtatactgatacccatatgcataaggcattgccctgggcaccatggagaaattcaatgtggtaaaattcccatcctagggagttaataatctgcttgagaaagcaagacaagcccatgaaaagttaaatagcaattaatgagttcaatgacagtacaagacaacagtggaaaagatactgctatgcaataagtaattagttgctaaattcagatagttaatattatagaaatttcaggggaaaataaaatccacatgatgtaaatttgttaaccaaaacacaagaaaatggccatcctacttcctcttactgaaggaagataaaaacactaaagttaaatatgtatttacatttcaagtgagtaatttgaggtgttttcatttaaaataaacattaattaactagcttcccaggctaacaatgtgtgttaatcagtcgctgaaccttgttttctaacaacttcagctgtaatgtgtaggttagaccaaaagattcagatggaaatcagaacaccaggaatggtgaagtcttagaagaaggcatgctcctgtagcaaaaacaggaggatgggatggggtcctgaacagcatcaaaaggcccacaagttgacagaacatagctgaatatcagagtagcctccccagagtcagtacgaatgaacaggcatggctgaattctaaaacattctagaaagattaagctaaaacatctacaagtgagtctcctgaatgaagcttctttatcatattcaccaattcactgcatccacccttatttcctagatgtttggggaagaggcttatatccagatatgccaccaaattcaaatttaactacaccctcagatttctgctccttttggaccactagagttcttattttggagcttgatgatctgcttgtataaactccgtaagcatagcagtaaagaatgtgactcccaaactaaactacctaggttccaatcccaatcccactgctgtgatctggagcaaattgcttatccatccactgagcctcagtttgcccagttgtaaatgggaaggatactagtattaaactcatacagttgtcattagggccaaatgtgctaatacatgtgaagctttttgaactatacatagtaaattccttataaatataagctggcataccctgtcactgctaagtaagagggcagaattagtaattcttttaattacttaacatgccagctatagaggcaacctgcctccttctctgggaccaacactggtcctacaaatggagctataacaagttggagtttatcaatttggtagtcttctttctggccttgtgtgtatcttaccccactccttccactaatacgacctaattataatattataattaattcaaaaattgtccttcttcctatcaggtcctggctccagactacctgtgtttctctggaaagagctattagtgttgaccaatgtcagtgattctaaaaactaagtcattgcatcccagccattctccatccactggggccccctaatgctatgctctgccactgatatatgcaggaggcagataaggaagggtccccagagaatttctgacctgccccacaagtgtttacaccagatgtttttgtgcagataagggaacctgcacagggtctttcctgggcatgcccacatgcactgaaggaatggagtggagccaccaggaattcacaccttatgcaggggaggagcctggcctcttcagctcctgtgtggtggcctggtattcaatctgcgaggtgggagcctattggcagggccccttctttctttgctgagagatttattttcgcctaatacaaccactttcctcacccttcaatgtgtctgtgtgcctaatttttcctggtcttgagacaagacctagattttagccaagctaaggagcaaaaaatcctgcatcattttggtggcccatatggggacctgaggaagggtgagtaaaatacggacctgaatgtttctttcccttttgttttggagccttcttgttctcagatttcttctaaaggtagaaaaaactgagacttgccttgtcactcttgggggtcaggaatgttggcctcagtccagcccagttttttctatggcaatttccttctttttattaggactgtaatggcagctatcttttcttttacatattggggggtgttccacccccaccccaatggccacaggtgcatgcacaggacagatgggtgagcagcagctccccgcccccctcccctctcggttggggctggggcacatggcccaagggccctgcgtggctggctggccagcattccctgccatgcaccgggagtcttcccctctcctggccaaggggtccacctcagtccaacagcaattaaaagtttctctcagctgggcacagtggctcacgcctgtaattccagcactttgggaggccgaggcaggcagatcacaaggtcaagagatcgagaccatcctggccaacatgatgaaactctgtctctactaaaaatacaaaaattatctgggtgtggtggtgcatgcctgtagtctcagctgcttgggaggctgagtcaggagaatcacttgaacctgggaggcggagattgcagtgagctgagattgggccactgcactccagcctggcaactcagcgagactctgtctcaaaaaaaaaaaaaaagtttctctccctgttggagaaacccatttacataagaataagaggttattcccccaggcatctttccagtcctgcacttaaactattattattttcttcttttttcaccctatcaggagttaacttttgtgtgagagatttttccttttagaaggtgtttttactaggccaggaccccaattcacaagatgctcttttctctcccttgttggaggggaacttggttccacagctttgccttaacattcagcttataaggagtccatgaaaccccatgagacacatttttgccccaaactccattccaagctttggaacttgaaggctactgacagcaggcgggacatggagttcatgggtaagagcagataatccctccctcaggcccccctattaacatgggtgaaagccacattgacactcatgggcagcaccctgtcatggccactgggattcgggaataaaaagatggaagaaggaaaaaggatgctttttccttctctcactcatatagcctgggtattcactaaaaagagaaagggaccaggggtgcctgttaccccttctagatgagtagccattcatctttagtctagttggcttggagttgagctcaggggaaaggaacccagaagcctgacatgctggcaaaagggtaaaagtttttaccagttgggcttttggcttccctctccctgtgcacaccagtaagaggaatgataagaatcactgtttatattatctgtgaagttctgattaatgaaaaaggatatatgaggttggtcttaagctgtagccaatctggtatgctttgcgtgtcttaattgaggtttgttggtcccactggtgaggttacttttgataaagttcaaaagctagatacatcagctgcttggcatggctaaagtgaactaataagggatttaaaaggattttcttaaagagagctcagcttaattagaagtgtatatccaagttataggtatatttaaaaggcctttatgtttttctcttcttgaatcttattttgctgaaaaaagggttttcctcagttgactgaattatttttctccattttgccttgccactcttaatgcatgcattagagcccctaagataatttctgatggcctgggactccttgggaaagacagaaaagacaccacggattccattttgggagaaacctctgttttcctcatggaagcccaggaattagaagcggataaatccctctcaaaatctgtttttgtcttccagctatacctgtttattgggccctggaaacagcatgctcttaaagggctccatcctgaggcaaataatccaattgggattgttgagattgggattttttttcttttttctccaccctgagaattgagattgacaaatgaaaaattttatagctactggatcttcttctgtctgtgtagttatatatgtgttgtgtgtgatgtctataaaaaagagctctaattaattggcttaaagaaaaataagcacttagatcaaacttagtcaaactttattgatgcctagcacataattaaaacaacttaccagattttacattacagttaaaaattcctaagagttaccactataacatgtaattgagaccactgaaaatggatttacatacaaggtgtgtaagaacagtaaaatgtgtttttagtaaaagattataagagggcatggaaatgtaaatttttgcctagggctaaagaattttttaaaattagataagataaagctaaaggtttaaacacattgtggaaggtttctaagaattaatcttgtaaaagaaattctgtgtttgcacattgacaaaattcaaaggggtattatatggttttaattcaaaagggtattatatggtttttctgcaaatggaacattgaagtaaaagcacaacaaggttttcttaaggcactaatctgctctttagcaaaatttgtagagggttataaaaggattataaggatctcacctggtggttaaactggttaagataagatagaattgtctgtaaagtttcattagaaaattgggatagacgttaatagtaagggtaaaattactattaatgtaagggtaaaatttggctttctctcccttgtacaagattttcacgtactagtaaaggataatgagcgattttcatttgccttgtggatagactgccaaggaaaagaaagagcagacaagagaaaaattttttggaaaacaaagtcttccctgttaatgagtaaagattttctgccttgttttaaaattcctaagtcatcgttttggcaaaataaataacttatggtaatctgaaattctattttatagcatcaagtgttttaaatttttaacatatttaacaggcttccctgaatcaaatttcagcttcaggttgtcttttctgacctcagcttttggatgctacagatggcccctggagcacccaaaagagaggtaaacaggattatttgacatgttgaggtacatgggattgccaaaatgatgtttaatcttcttcaggttataatttagggaataatattaatatatattccaaaattgtatgggatttctaaaattctaatgtttgggtatatgctatcaatcatgattaaggttgatattatgttaagttattgtaaaccacagagataaccaaatttctttgtcaatcgtgtttttgactgtaactaccctagaattttttttattcacaggcaattgttgtcttgttttgatcctgttcaaaagatggtttataatcagctatagaactttgacaggtactctcaaatgcagatttcttgtaattttggagattgtgacattggaataatgaattcatgaagagctgaaatgttcatgaatatcaaatagaacaagagttaatggaatggactgaactaatagaaaactgaagtagcctttttaaatgtttgcttagaacactgctgatccttgttttgtttttcagagtcaaggaaccttatgttcagctatttatggcctttaataattgaataaagtacaattctgtgacaaaatttggagcatatttgtttctctttgcctggtttctccagaatttggaaactagtcatgagtattcatgacttatggcagtattcatgacttatggcaaagtagttatttgtgtcagtgcaataagaatccattttcttttgcaacagaatgcaagtggagaaactggttgttttaccaaagctttgactggaagggtatgcatcccgttaaggaatcaagcttgacttgcagagctgataaaagtcccttgggaaaactggcctcacaccttgtattcacagtccctgtacagggttcctgacccatggtaagtaaagaatgttgctttctaacaagtccaggaatcacatgttcttggacctcaagaagagaggagtttatgcaactcaggtatttgagggtacaaactcatggctgggctcagctttaaaaaaaagaagaaaaagtcttatctcagattccttgtggaacagagttccatcaaagccaatctgaaaggcctatgtaaaaataattatttgtgctgtactttatgcaaataatcaggccaagtataagactaaagtctatttttcaaacaactcagtcccatcatgatttctttttgacaagaatgaggactggagagagataaattatgttccaaaacttagacatttgtcattaaattctagactcattagctgttttaattttttttcccccacattataagttaactctgattattcctgtgaaccaaccagtgatctccaactgcagctcagaagaaacaaaagagatgagtaatgtaaaaatctggatcaaatagtctagttctgggcaattaccttgcaaatcctggcaggtgataggagtaaatagggtgcccatcacccagaggtatcctttttgagaaaataagaccaagggagctaaccaaagtcaagccccatgcacccaaatcttagcaagcataactatagccaccagttatctgtgtgtgccagcagccttgggatttttgagctgcccttacccatccctttttgtttcattttgatacatgttttccaataacccagtttgtctcttctggccttcaggccatcaaactccaaatactccaaatagtcctgccaccggagcctttgatgatcaccccttttaccagggacccttatataggcctatgagggagatctgattgctgattccccaaaacagcacccctgtcagcaggaagcagttaatattggtcttcatccttaaccttatccttatccttatccttatccttatccttatccttatccttatccttatccttatccttatctttaacctaagggcatttagatgtacttctaacctaagggcatttagatgtacttctttagtagggggaatgatagatgcaggaggcagataaggaagtgtccctggagaatctctgacctgccccacaagtgtttatgccagatgtctttgtgcagctgggggaacctgcacagggtcttgcctgggcatgcccacaagggactggtggcccatgtgcactgggtcaatggggtggagccaccaggaattcacgcctcatgcagggggagaaggctagcctcttcagctcatgtgtggtagcctggtattcgatctgtgaggtgggatcctgttggcaggacccactctttctttgctgagagcattcttttcacctgataaatctacctttctcacccttcaatgtgtctgcatatctaagttttccttgttgtgagacaaggacctggattttagctgaactaaggaggaaagaatcctgtatcattaccttctgagaacttgtttatggtaggactgctcaaatgatgactacatattaacctggataccttccactgttctgttgaaatcttcacccatcacttccctgcctccaagaatctgactggtttccatgtctttgccatatgtggtttggtgtctaatctacttaaatgctgtcagagttttccatatagcagatagcctcaaaaggctgaatcacctcctctcttgcagacgttatggcaaatacgctaagaaatccttccaagcactctcaaaggattcaccttctctgcctcatctctggttagttggtttgacaaaatgagaagacgagggtgacattcagaactccttgattctgctattattggcaaaactgtctcattagcattaaaatagggagaagacctaggttggaagggatattgcttaaaaaagaaaaaaaaagacttctgcttagcatgcaaactaaagcctaatacttagtatgtgctgcagaacagagttgctgaatagttctgccataaatcattctacaatgcttaggtatgtgaagctgtaaacccattccataattttcattagaaagagaccttcatttcaaaaaaaaagaattgcagcccctcagtagagatcctctggaaatcacataaaatggaaaaaaatgagggaatctctatctatctctaaacacacacacacacagatacacacacacacacacacacacaccagggcaaaatattaacttccaatcactgctagaaggcactaggtcaatcacagctcagaacacagtgaaaattgtgttacaaaagcaagcccgtctcccagacaatcctgcccctgctgcacacctgtgctgccttctcatccaatggcctccagaaacctgtaggcaagaagctgatcattaggagccttgacctactcactcgtccccaacctctggtgcatctctcagaatgtagcaattattatcctagcaccaacagcagcaaactaacatctcacccacaaatatacttcttactgcctttcatcgtgtagcaaatatccttttatgcacacctcaatcagaattacccaaacagccattaacacagcttggagagggagaagagtaagaaaaagttctaaaaccagacaaatcaactgcaaagtcaaatttgtattaagaacccacagatgctgggggctagttgatggaagttaggcaggtaaggcaaaatttaaggtgcattaaaaagctcagtgactgagatagataaattatattctaatgcaatacattttttaaaatagaagttaatacagataaattcattgtgaaccaaatatcaaaattttaaataataaaattcagcagtaccataatgagccattttaaagcctaagacaaaagagaaaatcagtgatgctgatcgtgttttcattaaatatttggatatttcattcatcatggattttttttgcatgaagtttgattttttaaaaatgttttattaaaatattacatatcttgatttaggagtttcctggtggcaccctcttaaatttgcacccaaggcaagctccttgcttatcccatgcttatccctgccctgctccaaattactgataattcttgtatcactagaaagaacaagtattgtcttctgatatagccttccataatattgctacccatcttatcttaaaaaatcagaggccccggaattagtacaagtggaatggagggcagatcctacttaagcattcttaaacagcttaaatacgcctcttgggttcaactgctatggcttttattcaagagaaactgtaattggaaagtcacaaatttaacattaacttttccatttctgctgtatgttgggtttagtttcacaaacaaggtccttttagatcagtaattcccaggctttataccatcaaagactctttttctccccacctgtaaccagggcttgtgttttgaaatactttttttttgccaaacatttatgaatgaatttatgcataaattctgtccaccatttaataggccaagatatctgaatttgccaatcatatattctgatcagtgggagatcacctatgattgccagagggaaccagcacaattgtgatcaaaggcggagatacttgacctgcaactcagcctgccaagcttcatcaaggatgccacaatttcattagatattttgaaatactgagttctcaaaaataattataatgaaatattaacttaaaagagtgacatgaaagaaatggtaggtataccatgttttcacctagctttataaaactgtaatgtaaaaaagtttggtatagtagtaacaggattacatatatatgtgtgtgtgtgtgtgtgtgtgtgtatgtgtgtatatatatggggtgtgtgtgtgtgtgtgtgtgtgtgacgttttcatttaaaagttgaaaaataatccagatctccattaccagctttctagttctttggggacctaaggacctcctatgtaggaaccattgttttgttgaaacaaatcagctatggcaaacaactgaaagagatctggtagagcaatgagtttctgagcaagtatgaatgaatacaaggcttataaatgtatggaaggaaagcagaccaagggacccaaagccattgatcgaagcctgacataattcattaagaaaataacatttccagaagtttttcaagattatctactagaatgtaagctctctgagttgcaggaaccacctgtgtggcctaatatcctgcagcgttctccctggacagactcaatgcatatttattgaataaataaatgaatgaggagttccttcttttatcaccattgttttaacatccgaataaactttaaaaggcatcaggattagaaaaccatattaagatagatatgggcatccaataggagcagacccttgggaccctgtttaaaaaaagcatcttgtcaagaacaatcattaagagacattataaagcacctcattcattcacacctgttggctaacaaatcaatgacatgttccacagatgcttcctcttggatttgtcccacttgaactctccaatatcttgttcaagatagtatacaaccttaaccacactcatttattcttcattttcactatggtgctccatcctgtatttcctgcctctccaacacactagtttaccctctctagtcctgcatttatcctctctccttcatcccatttcccacctacagaatttggtccagcatgggtaatttcttgcacactttttgagtgattcctcataacaattctatgaagaaggcaatgcaaaacttattattggtcccattctatggatggagaaattgaaggttagagatttaagagtgatgacctcagatttcagtaagtgatagatctgggattcagaaccaggtctcctttccccaggattctgttacattaccaaggacctcaacatggtatacagcatgcagttgctcaaagcctgacaaaatgaatgatataagtcatgtaagaaggttcagatgatactagagagctctatcttcctgtgcctatggaataaaaatataattctttagcatgatatataagatattcataatttggcttgtctgactttcctgcttttttctccatgactgctcattattcccacagtacccaaaccatgctaacctggcaggatcccttgtcctccaccttcatgcctctaagcctttgcctatgctgtttcatcctcaatgcctctcccaccttgttcacctagcaagttccaactcatccttctagaacctgttaagtatgacttaggaatctttctcactgaatgaggcttgctctcctctgtgcccacaacactgttacttcagcagcttccacagctctcaggataaggtccatatctttctacatggcagtcaaggcccttcatgatctagatcttgcttacatcttcagtgttttcttctcctatacctaccatgccctctgatgctattatctctccataatgaaatacttatggttttcacatacacatcactgtctgtctctcctcacagcttttgcacacacagctccctctgcctccctcatcacttttgctaggaaaatttcaacttggtgtttgtgaggtcttagctgacgtgtcacattcttctggaagcccgctgagtcagcgttggtgtcagtcttccttgctgcctgagtgcttccgccatcgtggtacctccttgctagtgtctcattgataagtacttagtgactgacttttccagtgctactgtagtgtgaaggatcccccatcaggttacttaagggtgtatatccactgcctgcatcttgacagccggctggttggtgagctgaggtcacggtgaccagccaaagagcaggtgtccctgagaacccaaacatcccagagtatctaagaacctatcaaggaaaacagtcccatcatgcatgcacagtaggcctaagagccagagaattagcttaaaagcagcttagaggtgggaagtggggcggatctctagaggtgccttcctgcctgccatccaggagtaccctatatgtaaatcttaactcatctgcttgccaagctgcacttgtccaaatcattcttcggtctcttgataccttcctagtttggggatgaaggtgtttttcccataacagttatccttatagttttttttcttctttaatatatttcctgcctttcccagaagagtctgtgatcagtttctcctttattttccttattgtagattcatttccatcttttcaggttccattcttcacagagtgcttccattgtttgggggtgactgatgtttgggggtgactgattgagggtgactgatgctattgtttgagggtgactgatgtggtggaaagaatgctggatggggtgctagctcaggctcaagtcctatccattcactcattcattcattctttcaacagctatttacagaatactttctacctaagtgctaggtactattctaggtgatgaagggaataagcaaagcccctgccctcaaaaggttttccagtaagggagttagaccagattaaaaaaagataatcacatatacaatgtaatatatactagtggtaagtgttatgtgaaaaaacattgctatgatattgctcatcctatcctggacaaacctgttaaagctctctgaaactaaatgttataaaataacattctaaaatggtgctaataatatctgctctaaataactagcaagggtggctatgaggctcacatatgaaagaatagaaatgcatttttgaaaacagatgaagtatatgcctttattgttattattttaattttgatgtaatgcagtgtctatttgccctttccaagagccaacacatgaattttaaaaaaatatccatcagtcatttagatgtttgaaaatgagcaaatgtctggctgacagcctcggtcttcatctgaatgtttggttaacctatctgcatggttggaaaagtcatgcgtttactgctgtgcccttgaaagcatcaatctctaggattattatttttttcttacactattgagataatggtaattttcctgtctaaatataaattttaaatgggcattttcatgcccactttgaaaaacaagctaagcaggactgtccatctcacataaatgttatttatatttctatgtagctcgtttttatttggggcatatgtgaattccaacaatgtgtaggagaatattaaatcattacccatgaaacttaggaatcaaatttaattttgcaactgtttgcaaaatttcaaaaaattgcagcatactttatgtagctttataaaggattaatacataaaaataaactaagcaatgccttttctatattacattttgctaaagaatgttttgatgtcaacttttttgaaagctgactagaagtgaggagagaatgtagcaaatagaggagagcactggcctctttacttatatatttgtatatttatttgcaattatacaataagatgtgaacacatgctcacaataattcagacagtaattaaaaggctcaagttccttttacctattctgttccctcatcataaccttaccccaaccatgaagtgattactgttatcaatttggtatgtatccttctagaatttttagtatgtaatcacaaacatatatatggattttacataaatagcacgctatacatattgtccagcaagtttgtttttgacatatgtcttggagactttaccatgtggggacatcgagttctagcatattctttttcactgtggcatagtattgtattacatggatccactacagtttacctaccccatttctggtgggtgggcttttgggctgtttctgatgtactatgctgtatatggttcccagcacacatgcatgcatatttctccagggtatacactgagaggtataattgtggcttcagaagtattcacttcctttcctccatttaaatttaaatagacactgcagacttgccctccaataatgaagtaacaatgtacacttccaccaacagaatccactccagttaagcatctctgtggtattctagggaggtagtcagttgggcagaagaggctggtgtcctctagctctctgagggttatgaacatacattcagtaggtaaatcccaagaggtgaaaggatctcagctggcaatggttctccccttttcatttcactagagtgaactcctttttaatgcttctttgtcctttcttatttcggtttttagctgaaataagatgtgacatgctcacaataattcagacagtacttaaaaggctagatctttgataacagatatcctgtgaacctgtgtttcacctgaccattaaaatcgttctttggaattaataacaactaccgttgattaactgacacacactttggatgtactatctcaatacatcctcaaaatacatcctcagaataactctgtaagataggtattgctttgatctacatttttcaaatgagtacacaaagaggtatgtaaatctacccagggacataagggctattaagacatagagcagaaatctgaatctgggctgggtggtttccaaccccagttctggggctatgagccactgggctctactgcaagcaatcattcccttctctgctctcctaagcctgtttatctctgcctcccttgcatcaggcattgctttctaccttttattagttatttgtcaataggatttatcttatcttttagcctgttagcttctcaactgaaaaatgcatggatgagtcacctctgtctccaagaccatttcaaaaaatacagtacctcaaacacagtaggaacttgataaatatatcttgaaagaaagatgtacttaccactcagcttcacaaaacttctcccttacaatccaagatcactgactgtccccctgctgaatctgacaatggccttcatgggtcgtccactgtggcatcttttcaggaggtaattctcatatcagaacttctagatacgaatggcttctaatcctatctctaccactgagaaccattttctttatggcccattctcacacgacaccactgatgcaggatctgatgtcttcatgtgagttaatttatctgatacgttaattagaattaatttgccttaattgatcaattggagacattcatatcttgcagcccttcacttctaaaccctgttttctaactttccctcccagacctcttcttctagcatttaaccccagattttagtcttttgggcatgcctttattctgctttccagctcagctgctgagggaaatcctgatttgactgcctggcttccatggcagctaaacatctggatactatcttttgaatcaccttccaattcatgctctaattcccatgggtgaatcacaccctacccatgactaaggcaaatcctcactatttcagttagacccagcatcttgagttcctgtttattcgaatggtaactgaaataacatataacaaacactgtaacaaggactatcagtgttctattgaaagaagtggccctcgtgtaaagaagactaagccaccactttctcctctacctctctgtagcctactcatcctgaaagccatagtccatgttgccttcctcaactgtccccaacagttattaggatacttattaacttctgatattcatcaaccaaactagcatttaattatatatggtcttatattgttttatgtgatctatcatctcccttattaagcaaaaagcttcttgtagcagggaacaaacatattgccatactctcctttatcatcattgtcctcttcaccattgcaaatattttctttaacttattgagtgcagaatgctttacatgaattaattcatttaatcttcacaagaacactatgaggtagatgccattgctatcctcgttatggatatgagaaaactgagcacagagaggataagtaacttgcttaagatcacatggatatactatgtggtgaatcaggtatttgaatcttggcagcctggttctagaatctaagagcttaaccagtgagactttctttcatgtgatccttttatagtaccaaaaacagctgagaacgtacatagtactaaatagtaataaataagtacaaagtaagtactcattagatgcctaatttacagtttgatgcccatgggcttttcagtgtccttgagtcctctctatcatcatctcaagactcaactgcatatagttcaactacttaacataggcctggacacagggaaggggtcagactggaacaagatttgttgacaattctgcacagaaaaggaaacagtcaacagaataaagacaacaccagtagaatggaagaaaatatatgcaaaccagatatttgataaggggttaatatccaaaatatacaagaaactcaatagtaataaaacaactcactttaaaaatagccaaaggacctgaatagacgtttttcaaaagaaagcatataaagagctaacaggtataagaaaaaatgctcaacatcactaatcattagtgaaatgaaataaaaatttaaaccacaatgagatatcaccttattcatgttagaatgtctcttaataaaaagatgaaagataacaagtgttggtgaggatatggagaaaagggatcccttgtgcactgttggtgagaatgcaaattaatacagccattaagaaaaaaagtatggtggttcctcaaaaaatttaaaatagtactaacatatgacccagcaatcccacttctaggtgtatatccagagtatatgggatcagaggttgaagagatatctacattctcatgtttactgcagcactgttcacagtagctaaaacatggaatccatctaaatgtccatcaattgatgaatgaataaagaaatgtggtatacacacaaatagaatactatccagccttaaaatagaaggaaactctgtcatttgcaacaccatgtataaacctagagaacactacattaattgaaataagtcagaaaaagacaaatatcgcattatctcacttatatgtggaacgtaataaagttgaactcatagaagcagagaatagaatggtggttactagcgactagatggtgcagggttggggagatggcggtcaaaggatatacatgtctttttttcttctttctttctttttttttgagatggggtcttgccctgttgcccaggctggagttcagtggcactatcatagttcactaaagcctcagactcttgggctcaagtgatccttccacctcagcctcctgagtagctgtgacaacaggcacacaccaccaaaggatataaatttcagttagacagcaggaatcagttcaagagatctattgtacaccatggtgactatagtgaataactatgtattgtatactcgaaaattgctaaaggagtagattctaagtgttttttaaaaataagaatgtgaggtaatacatatgtataattagcttgatttatctatcccacaatgtatacataaatcaaaacacaatattacatatgataaatatatactatatttatttttattttatttttttttagactataaacataaatattattgtttggcattaccccaaagttcccctttaaaaaaacaaataaatggaaataatatatatttgagtgttctgtctctactttctttgaaccaaggaggcctcatactttatgagtttgttccaccctcttctaatatatctgtcaacagagcatggcaacagtgttacaaaatttaatgttttaaaattttgaacaaattaaaaacatgaaatttatatttctcttacattttactattctctaatgagggaaaatgatttaaattttggactaaatgcaaccagcatataaaataattctcttctgagtgatagtgaaacaattactgaattacaactatatgcagaaagtatttttgcctaacatgttttccatgtgactaacattatagctcattgcaagtggtttatttgttttataattaataaagaagtccaggtggagtttaacacaaaaacagaagatagagagcatttaattttgtagagagctttcagtactaaaataggtagtcagaattttctgactttaatggagtcagaaactgggtaactttcattcttttaacttaaatcagtttctggatttagtttatcaaaatagactatattgtatgtgtattggtgaactagaaatagatcagctctcaagaaaatgtggcacatatacaccatgaaatactatgcagccataaaaaatgatgagttcatgtcctttgtagggatatggatgaaattggaaatcatcattctcagtaaactatagctaggacaaaaaaccaaacactgcatgttctcactcatagatgggaattgaaaaatgagaacacatggacacaggaaggggaacatcacattctggggactgttgtggggtgggggaaagggggagggatagcattaggagatatacctaatgctaaatgatgagttaatgggtacagcacaccagcatagcacatgtatacatagcacatgtatacatgtatacatagggcacattatgtacatgtaccctaaaacttaaagtataataataataaaaaaagaaatactatttttatttttaaattaaaaaaattaaaacagcttgtccccaagagctgtggaagcaatggagaggcagactcagaggaagacgctgcaagagagatggtttgactggagaggcactgagcatgacaacaacaggatatggtccagatgtggcagacagtaaagcacatggggggctaagaaaatggactttgaaagaggactgcctaaactggaatcccagtgccacagagtgctactcatggaactgttgtgagctatgtgagtcaattcttctaaagtactaagcacagtaaaggagaaaggtgtgctgtacctgttaactgctatattattctgaataattagaatgaagaccaatatctgacttctgggtttctgacttatatgtggggcacagcaacagggaatgaaggcacagtgaacatgcagaattcagcatctttcctcaggctctggccatctgagcacacttggttttagtgaagttagcttataggcagttctagaaacaaatttagggaggatttggggccctaagcctagagattccaaggtccttgtataggttaacacaatagaaatgcatgtaccaggtacagaagagagggccctcatcaggactggggtacaaactggggacttggtccagacacaggtgacatctcgtggctcaaccgaggcacaggaccacagtgagacaacagcaagggtaccttggagcagagcctaatatatggggtggaattacagggcttaaatcagtgctacctcttctcaggagtagcgcagaggaccatgggcaggctgagtatgcagataaggattatatgactccaaaggtaaggaaaagctgggagttgggctggacctaatccatgttgcatggagctgcttcactgccctgtctgggcctcaccttcttggtgagcaagcaatctggtaccatgccctttggtgaaatcaggcatggaacaggtgactgaccttggggaacgaaagccaagctgccattcatcacagcccatggtgcaaacctctaaggtaagccttggagcctccagcgccccagcggtggggcatccgtcctctgggcagggagcttcaattcacacagcaggagagccataacatagcaggagacacacagaaggcctttaaatgtctattttttaaagtggttagcaaagcaggagagaaactgtcagagatccgcaatgcagagtttaatctggaaagtcagtgaagaggtggaaggaaacagaaaacaggagactggaagaagaggcttcaggatttggggagagcaaagcaaaaagtgttaacaagaaaaaaaaaacagttgcatatcagaaactgctcaattctcatgtcaacatttacagaacactgttttccatttttccgactgctctatgcatttgacaaatttttacttgttcttaattctagctcaaagttcacctcctttagacaaagccataccctcttctggcctctgttttaatagatacaatgtttgtaatagcatatttcaaaatattgtgtaatgaattgtgactctggatattatagccactcatcattttcttgaggatatttatccttatatccccaggacttagtaaagttcctggcacatattagctaatggtcaattaatggtcacttaatgaatagaagattaatgaatgaagaaggaaccaaggagggaagatgctttatgactgtacagggtgcatgcgaggggaggcaggaagtgagatctataaaggtgtcttagcatatcatgctggtgatgtgagccaagctaagcattgcagctttcatccactggcaaggtagcataataaaaggctgtaaagcagaatgtttcaaagagctgttcccccagtgccatcttcactctatacgttattaatctcatttcttccctacttcgaactaatgtgctcacattcaaagatttggcatatatagacccattcaaaacaaaatgtttcaagttctccagaaaataatcctaaacctcaacttcttcaagaaataatcctaaaataacctcccatcagcttctttgttactcagtattttattcttaacttattgtaaccttgtacctatttatttgtcccttgggagatgatggttttctttaagagttatgagtgtactttctagtgccaaacttgggttcaaagcctagctcatccacccacaagctttctgtctttaactaaattatttaatatcactgagtctcagtctgttcacctctataggcatgataaataatgcctacccacatgatttcggtaagaattgaaggctattgtaaagtttaaacatgaactaaacaatcaataccagcagctagtaatagtggttctgccaatattagttaaaaataataataatagtaagtttgttcttatgccctggcatactctctgggagaaagaatcatcttctctttcttaggttattatttctttttctctcccctcctacaactgcacatctgcctcttcccttcacagtattttgcaattctctgtgtgactcaaagcagagctcaggttatgcatgacagctgcctcttccactgtgccctggcaccatggatgtcactgccatcctccaccccatgcatgagccagaaccctgggctccttctgactcaccattctccctcacccccaccatacacagttcatcaggctctgtgaatccacatcctgaacggctcctgatgctggccattgctctccatgtgtgccatcaccttcaacaggttacctgcatctccaacccagactgccaccagagcctcctgactgccctcctgaggtcgcctgtgagaaataaaaatggaatcctaagccccccaactgaatggaccctctattggccaaggggaccccagattaaccttaaaaattgagttctcagccatgacaggatgagaggtcagacatgcctcagtatatccctccctcgctaaccatgttaggctttcctccctaagggataaacagaaactagctctttggaaagactccacttttgataccaacaaaccacctgatgctgcccctcctttttttgcctgagaaaagaccactgaccatgcagtggttctggccagtctatggagaatgtgcagtaaaggcttttgtgtcctctgcttcaccttttgacatcagagagctcaaaactccacccttggatcatgctaatgctaccattttttttgtacatgggacccacaaatgggcatgaagttcaattgcacaggaccacgtttctcctttcatgaatattcatgactcctcctatagcttattaaatatgtatatttggccaccttgctcagcgcacgttcctattccctttacctctcccttgaagtgtctgtttctagcttctggcaagaggctatgcttcctagcctgtgggaatgggcaccctgcaggctgcaacactttatgagaaataaagctgttttcccaaatttatgaatcttgtcattcttcagttgatacttgtctccctctctgcttctcattactgctcaattctccactctgtagctggaggggtcttcttaaagcataactacgatcatgtgaaacccccaccctaaggccctctcctggcttccccattgctcttagcatacacatccaagttgttaaacatggctgtttaataatcatgcttattatctgtgctggagccacactgactttatatcaggtcccctctttgcataggctgctattgtttcctccaataagctctccaaataaataagccttgcataatactgcttaaaaccaaagttaagtcctgaactctgaactaggaaggtctctttttagttcaggatactgtatgtcactgatataaagcactgtgtggagacaagtctcagagaaaaagacgaggctggcagaatataagagaaagtgacggatggaggaactggatgcctaaaagcacttcatttcacttttctaaatgtgccctgtcaaaatgaagggagcagacccagtaaggctgaagttagtggttgcacaataaagtagaatatttatcttcgctctggagctgcagaccattagcattagaaaacaccaccaagtctgtctcctaacatgcctggggccctcggaatggggaggatcctgatttaatgagcaagttacaccatctgtcaacaggacggctgagaggtaattcagccaacagcagctcccagaatttaaggagcaaaacacttgtgtgctatttgtgtaagacatggcccctagcttcacggtcaaggaatcctacgcaccctaactactcaagctgggagtgaggggtggtatctgtgtgtcttgctcacagtccagccagcttcagcttttttgtgtgggtgcttgatgagctttgcagaagggagacatccagctagaaatagggtcctggagagttccctctgcccccctttctgagcctaataatttctggcaagaggctacaacacgtattaacataaacaatatcactggccaaagtattcacactgttatggatggaaggaaggaggtgacagaagagagtatatttcatgtatattccttgtgagacacgattttgaaatggaaataatctaagagaataaattttgcacctagattagtgaaagcaacatggagttgctttggaaaatacctcagttgtaaaataatgtgatcttttactaaatgaactggtaattaatatcaaaatgaggaattttttccctgtaaaaattagtcaacttggaaatctatataaattcttcttctgtatttctatagctcattttataatacttattaaattttgaagtttacggatgtggggattttttttttttcacacacacttgtgagtccctaggccagagcttggcacacagggaggtagggtggcaaaagtgtatggacccaaaagtcaaataacaggaaattcaaatcccagctctcttacctagcagtatgaatttggtcatatttcctaagcctcagcttcctcatctgcagaatggggagaacaactatccatttctccagggttgatgtgacaattaaatgaaataaataatataaaatattactattatctgtaacacacaggaatcactcaataaatattgactactgttagatattcaagtgaaaatattcatttcagcataatgcttttatgcataaattgttgtgaaatcatcttgacatcctaactcccattgttcaaaacaaacaatataaatttgggtaggatttgatatgaagagacaactgaaaatcagttaaatataagcctggtatctatgaacttcttgactgtcagctttgagtcttactctcttattctcctttgaagctataatatctttcacagtgcttggcactcagctccagaagctataatatctttcacagtgcttggcactcagctccagtaaatatttatttaataaatggaacatttgttgaataaatcacggggtgaataaagtgggtgaacaatctgaacaatcacaagcaattttacttagcttgtttacccaacctagctttaggaatctattagaatgctatcaaaaagtagagagcactggatgcgggaaatattaataatttttctagctttccttcaccacagctgtggtggacatttgtcatgctccctggactgtcatcacattctgaatacctatcctatgtgcatcagtttcccattgctgctgtaacaaattactacacatttagtagcttaaaacaacacaaatgtattatcttacagttctggagctcagaaatctgaaatgaatcttaaggggctaaaatcaaggtgtcagcaggcatgtgttctttcttgaggctccagggaagaattaatttccttgtcttttccagctactggggatcttttgcatttctggtaactcccttccttcctcttcaaagcacatcaatccaacctcagcttctgttctcacatcttctttttctgactctgatcattctgcccctcttttataatgacttttgtgattacatttggcccacccagataatctaggataatctcccaatctcaagatctttaatcatgaatgctaaatcccttttaccatgtaaaataaacatattcataggttcctggcattagaattaggacacaaacatctttgggaggctattcttcagccaactcactatatttggagtatttcctgccttttgtatccagtcccacccaggtagaaacctgtactttactttggacaggatgcaggcatgtgactgaacttagtcattcagatgcctgagattatggttctaaagtgaacagcatgagcaagcaggtttgatatcaaatccatcttctggtgaggttggtagcagcagtgtccagctttctggataccaatggtgtatagagctcagtccacaccagtgatgagatctggctgtttctacacagcagtggcaggagtctttttttagagcaatgccataatatacccttgtaagtacaatttccaattactattttttggcctaccctcagactctgtgagcacctcaagtgctttaataaaaaattttttctgcttatagtagtcctgaaggtttcattatttataactaaggaacccagtggacacagcctcctgtgctaggttgtaagaagcgcttgcagggaggctgacggagtgctcctagaaaattggaacagcagacaatcatttggggcaccatttaggtgccaagtacttagtaaaaaaggccctgaagaaatggaatgcaatcattcaaactaggagttggtaaattgcgctgttctttataatacccggtgtagggggaggagagaaagagaatatcctatggaggtctgttctgagactttgatcttcatctcttctcaatatgacagaccaattcagatagaattctgtttgtgaaggaacagcaagagagattttgattactgattctggtcagcatggatgcacccctcagtgattttcaaagcactttatggcctttagttgtttacattaaattaaatagtcttggatatccattagtttagaaagcaaaattatatctggcttaaaactgctttttgcctactgcctcattcgcctctgcattatctagaacttgctcacatatggctcttactttatccatctgtaagacaaggtgatttttttttttttttcgaaataatgcatttccatccctctctgttcggtgtcttttgcttgcagtttggagagcttggttcaaatcctaactctagcagttagtagctgggtgacttgaactagttacttaacctctctgagcttcctttttctacaaaatgttgataatatactcccaaacagacttgtagtgaagattgaataagtatgtgatatggtggctgagctcagactctggattcagacaggtccacattcaaatcttagcttacatcttaacagctgtgtgctcctcagtgttacctgggtgcctgtctcctctcaatagaatcagagatggataagaagtccctcatagggttagagataaaatgagataataaatggacagcactttgcacagtgcctgttaggttctaatattatgaacagttaagtggctgtttggagtgggtgtttggagtgaattaaggaattatcaaacgaaagaataaaatcaacttcatgttttcaaacacccccaccaccaccttctctcaacacggtctctagtgatctgaaatcctttctaaataattgtttaaaagttgttaccactaacagagatcagatctgtggttgcctgcacaaggattggagagggactgactacaaagaaacatacagaaatttggggagtgataaaaatgttccacatcttagttgcggtggtggttataggactgtcttttttaccccaaactcatcaaaccatataattaaaatgagtgcattttatgtttaatgtacttcaataaaagtttatattaattaatgtattatgcttctagagcaagggttagcaaacatttttctgggaagggacagatagaaagtaatttgagctttgccggccttaggctctgttgcagctactcaactttgcccctacggtgtaaatgtagccatcgaaaatagatactagacagtacataaatgaatgagtgtggttgttttcaatcaaacacaattcatgaaccaaaatttgttttcatataattttcatgtgtcatgaaatatattatttcctcttttgatttttttccccaactatctgaaaatgtaacaaccattcttagcccctgggccttacaaagacaaggcagtaggctggatttggtcagtgggccactgtttgtcagcccctgctctagagttccaaagaggctttgttacgcagcgttatgaaatctgctttagggacttagtgcaaataccatgtctaagaggactgggagtccagctcctgtgagccctgtagggtctttgccagaacccactctctctgtggccagcctaagccgctgcttcttgacttcaattttgccatctgtgcagagaggacaacaatcatctctcagagcctggtaaagctcattcagcttgttatttgagagaaaatgctctaccaagtgcagaagctgatcatggcctgggttatgagtctggcctgtctcaatcatcagggggaaagtttgatttctcaggttgtcattcctaaaattgcttgttctccaggtgatgttcttatttctgaatatggtctgaccttcattccccaaagagaagggttatgttttcaaagagctggcagaagaagagtactcagaaagcttgctccttccctgccgaactgccatcccagcacaaaccatgccttaggggagggtgactttcccccataatgtttacctggatgggaccagagctactctaagctcctctgagagcaaagggagctttataaatgcaaaccagcacaaactgaggtttcttgtttttggtttctgacagtagaaggtgcttgaagcattactttggggtagtaaaatggccaaggtatccacaaaagtcaagacagttctgaggttcttgaagcttccgagcttttaaaaattgactattacatgtaaaattcaatcaatcccttactgaagaaaaaatcattattcaggtacccagtttatcctcctacctgttggaagcatttgattcaactgtttctcagaaatgtttttttgtaaagaggcagagaatacatgttttaggctttgcaggcagtatggtctctgttgcaactactcaatgctgctgctgtgatgtaaaagaagccctagacaatacatcaatgaatgagcatgactgtgtcccagtacaactttgttttctaagttgtaaacaaacaggttgtgggctggatttagtccacaggctgttgtttgctgagctctggtctgagttgtgttatatctagaagggacttggtggtttagggaagagaaaaaaacctaaatcagcagagactactggtgagaatgtggaaaaacctatcattacggattggagagtaaaacccaaccaatgagcatgttgcattaggagtaggatggggataccctagatgaatcctggccatggtgaattttcctgatgaaagtagaaaggcagccagtggatgggcagcaccggggacaagaagagccgatggggcattatggggagatactgctgctggctggactgctcataacagtgttcacaaagaagcctctggttgaacatgtgagaacctatgagtaagccatgtaggattcaggtgggtcaaaataaggtaaaaaccacagcatgagcaaaagcacaggtaagtgtctgcaaggtgccttcacagaatcctgagttggaaattggagcaaagttggaaaggtcagtctatggcacatcatggaagactttaaaacatcactttcaacagtgtgaactcttcatttttaagagtcagtgacaggtactgaaggtttctgagcttgtagtaccatatcccctacaaagcagctaactcaaatagtcttcctcctttacaaagagactatggttggctgcatctcacatgttatgaatttgatgctaataccagatcacatttattaagccattattatgtgcctgataatactgtactaaatgctttactttcatatgtcatttaataatgcttataaaaaatcactgatggggttattttttttgaaaatacttggaaaatggtttaatgatgttttacaacagaaatgaactgtacagttatggtaagtttaatatatatataaaattacagcagacaaatgcatctacacaaaatctaccatttcattctgattcactgtcacctacacaatctttcccaagcctacaacccctgcaggcagccctaggagggggaatcatctaaagggcacattgagagagacagcaccgctcatattcctcacaacctcctcaggcctcaggagctgatggggttatttttatctccattttacagattagaaaactgagatccataagaagttaacttacccaaagccaaccagcttgtaagaggcagagtgtgggtttaaatgcagctcttaatcattctcaactcaagctatatggcatctcagtggatttaaacatatttctgcattttaatagttaaataaaatacttttaacatcatttctaaattgtttctccagtgttccctctcctcaaagatctccaatactataattacatttgtcatccttttatcttcctatgaattattttttaagatcaccagattaataataaaatatttgtaaatttaaattttgttcaaatttaatacaatcccagtgcactgctttagtattaaatcttgatttccatcaatgacatatctatccatctatgtatataattattttcacattatttgggctatattttaggaggatgttgctttaatgaacacaaaccatatatttatctgacatgaatttttggccacacacaataatgtgatataattttaaataagtaaaaaatgcttatataagtaaaagcttagaaagaaacaaaccagaatattaataatagttgtattatggttatgtgattataagtgatctgttttttctcttttttcccaattattttaaattggattatgttagtgttaaatttttaaaatataatcatgtgaaaaatgttctttttaaaaaaagagaggttataaaataatccagtgggaactaatcagcaactaatgaaataatgcccaaatgcaaaaagtgatgatgttccatgaaggttccatgtacttaaagctactggatctcattaaatcactgggacctaaaatcaggctggctggggtgggtctacactcagcttctctaagtacaatcaatttaagagaaacaggagtaggggtttagtggattagtcacagcaggccattaatctctgcattctcagttgtaatccagcctctaccaacgagcttggaggaaaaaaatcccacaaaaaaaccaaacactgggaaaagctctaaagcaggctccctagagacagacatactcaggtcacagtttgcttgtctttacttaacatcaatacagtatttatcatctgtcctatttcttgttggtttcccttttatgccttttgctgaaatgctcagatcagatatatttgaaaaggaaccatactgcaatctcaggaatagctcagcatttaattatcatttaaagaaatccttctctcaagtgaatatgaaacaaatcaaagctatgttttcatgttgagaataggttgaaaaaaacatgggtaaggttaccacaaacacaaattagtgcttggggaagcaggtaagtctgaacaatgaaaagggaatagagtagccaaatttcagtaaaaatgagtgacagtttcaaaaattgcagggtaaatagtgtatcttttatcataaatggattaggccataataatacctcacttctttattgctctggcaaatgatctagaatttactaatgtattaagtgggaaaaaataataagcaaattcctgagccagggttctatttatgccactactgtcaaggccgaatatttattggattatatgagaccatatgcctacattagaggttttgataaatttaaagtgcagttgtaaactaaaaatatggggcattaatttcttaatttttaaaaaattattaaaggaacatatgggcaagacccagtaaactgtctctgaagatgatgctatgaaaagacatgattatctcccttcttattacctttaaaatattccccaaacattctagtttcccctagtgaatcagattcaaccaaccttaactgattatgtgctatgtgcagacattgtgctgaacactttcacatgcattggctcatttaatccccatgttttacatgatattgccaaattccttcctaattttgctcaacgtgtcttttattcttttagcttcagccatatcgaaagcaaaagccaccatttatcaagtgcattctatatgccaaacaccaggctccattttttttatttcaagcccgcttaactccaaaaataggtgttattgcctccaatttacaaatgaggatactgacacttagttagagatattaaataacttcctaaagtcacacaataagaaacatcagagttgaggttaaatagtaagataaggtataacgtataatgttttcgatgaatgctcttcaatacatctgtagcagtcaatgacgacccctagactctttcccagcgttgcactagagggtgacaaggtaatcattccacaaatgttatttgggttatttttctcataatgccttatcatatgattgcccatatagaaagtcattttccactttttgttcactcacagtcgtgaaagatcttcctatattttcatcttgttgcctcaacatttcaaaaactggggaagtttagcatgaacagcaaatttggacaactttctgtaaaagtctcttaatatactaaagttcctaagttggaaagggatctagaaactacttagtccaatatgcttaaactgtttaaaaggagaaaactggccccagaatagtaaaattaattcctccatgccacagaagtagtagtggcaaaactaacactaaacacaacatgtcctaacttccatcctagtaatctcttgagcaaatcacctaattctatcttccctataatgtataaaaatgtgctccaagaacaatacttaagaaggcttaaaattctagacctagaaaaggtatttgtttatcttaaccacagtttcctgtctctgatctaacttgttatgcaaaataacatcttgaatcccatagctatttaggtttgtttaatagattttgaggtaaaccattgctgaaaggatgtttgaaagattagtcactattctacatacttgcttactctctcaaggaattcaagcacattactagagcctcataaacaggttatacattactttcagatataatacagtaaaatggtaaggaacttcatactgtttgacccaataatcacaatattgagattatttttaaaaaaaattcgataaatatctacttggataaaaacaaatgccaaaaaatgtcataaactagaaacaacatatatgcttaaaaacaagggaaagttaaatataaataatgctattttacatgaataaactactatggaaatataagaaaaaaataatgcatattgaagtagcagatactagctaattgttcgcaaaccattttccctttgctcctggctacaaggctagcctacaactctctaactgctttaaaataagatgttaacaggtgcaacacaccaacatggcacatgtatacatatgtaacaaacctgcatgttgtgcacatgtaccctagaacttaaagtatgataataaaaaaaaaataagatgtggctggctgggcactttggttcacgcctgtaatcccaccactttgggaggccaaggcaggaggatcacttgaggttgggagttttagaccagcctgaccaatgtggtgaaacaccatggtaaaaaaataaaaataggccgggcgcggtggctcacgcctgtaatcccagcactttgggaggctgaggcgggcggatcatgaggtcaggagatagagaccatcctggctaacacagtgaaaccccgcctctactaaaaatacaaaaaatcagccggccgtggtggcgggcgcctgtagtcccagctactcgggaggctgaggcaggagaatggcgtgaacccaggaggcggagcttgcagtgagccgagatcccaccgacagagcgagactccgtctcaaaataaataaataaataaataaataaatataaaaaaataaaaataaaaataagatgtggcaatgtgactgaccagaaaggatgcccacagcttttcttcttggcccacaaaaacccctcccatggtcttcctctacactttttttccccatctggtgatgttgatgcccaggaaaactttggaaaccataggaggtagcacagcccccatcaaccttgtgactcccaagtcaccactaaatacagaattttttttcttttatctctttcctctcaccaagcacctacatgcccacacacatacattgacatctattggacaattaatgcaaagaagtaagcctccattgtgttatgtcactgagattgtggggtgtatgtgtcagggtccaggatatgctgaactgacacaactaggaagcaacatggagaaatatttaagatataaagtttctttttacagtacaaattggaaaagttacagtttcaaaatttagtaaacaaaaatttggtctatggggaataatttttttcctaatttttttcataatattttatcatatttggcataaaatacactctgattccaggcttcactcatgtctgtgacactaaaacactttgcatatacagtccctgtcttgcaaggagcactgatcaagaaagaacatctgagttggatacgtaattggcctaaacaaccaaggcataaacacaactctcattcatgaagttgttcaacttgtctttggatgtggcacattatatgcctttacctggcttagtcaagctctaatttaagcagttctaaaagcagatttaaaaaaaaaaaaaaagcctgcactaacttatacacttaaaattgcatgtggctctcattcaaccaataaaactcagtgctaaaacaaactaaaaggccacaaggaacttcaccacagtagaaaaacaggaatgaaacttgttacagaaataaaacataatgacttcactactttatattccactctacaggggtttgagtcactgtaacttaagagccagtatcattatggtgcattacaagacttagacatcaagtgacatatttctatcacacccaggtcatacaatagaaacttgatactcaccgatgtctcactttaaaatccccaaacatccactgagaaattaacaatagggccccttttttttctataacccctttttatttttttctgtaattaagattacaagcaaacaacaacaaattatccaattgaccatctcctcacagttgtaaagattaaccaggtgattacagggtgaattcacagccaaggacagcaaatccactctgttctttcaattcctaggctgccagctcttctctggtaagaactagtcagctacaccacaattctgttacaaaaggccagaggggaagtaatgttttctgacacaagactgaaaacaccatagagaccacagtaatttcctgtattgctctgcatcaagactaaaaagtggggtaggctattctccctaaagcactctagttcaacacactaacaagggaacagtgagctttctaaagtgttgttttctcccaagtaggaacttggtaagaaatagcgtacatgttccaaacaatctcctcaagtaggaacagagatgacatggagaaaagaatgacaatgtatccactgatctttaattgtcctagttcaagcctttggtatggtgtcataaatacaaaagggccgaaatacattttaaacaactataagtgccccaaataaggatgatttgtcaaatggaaatatgagtcagagcaggactagaaaactatcaaacatattgctcattgggaaggttcccattctctgtgactctgcacactcaaaaacctacatgcagtagaagcaagacaacagctggtagaggtgtcttcttcatctcccctccctcatggcctcagatcttgtccctcagtctgccctgaatgcagaaaagccactctccatcgctccttattattcatttatgtattaattcagtcattcattattgagcattttctaaatgccaggcactgggttgggtaatgggaaaaaaaacactcacacatttgtgtgtcactacacacattttatagggcaaagaccattgctgttttttttactacattttatcttatgcctggcccagtgcccacctcataggaggcatttgttagcatttgtgcaataaattaacaaatacatttaacactgggaaaaaaatcttccatatatattactttattgtttatttcaagaatcctctgaggtatttattattattctaaccttgtgttggaggacaggcctatgctccctcaataattgcagctatcagaattgttttccttgaggctaaaaggtagctgtgtgtgtagtgagagagaggggagcggaaagagaatatgttgactcacatccttcagtaaatctgtttattccaactctggcattgctgccaaatgtgttgcaaagccagcaagacttggctctggaaaactcacctgaaagtcacaggcctcatttcctactgccagccccttcagccaccaggcatgaagtattggacaaagttaaagattaattcttcatttactgtgacaaaattaccacttctcccagatcagtaggcaaaggcatttgtatgctgtgtccttcataacctttgataatctctccactgccatcctgatggcccagtaatgcaaatgtaatcaaaccccacactggctatcccgttaccagcccaatcttgctaataaacagcaattgtggctttgttataaaagtgatcctagatcatttgtcaccacccaaaccttcccaccccaacccctgactgctggaaatcctttaaaggtctgtttaaggttacatgaaataaaaactgcaaaaaagttacagaaaaccttcactaatcaatgagtaagatgataatagatataccgtaaaatccatggtcaacagggtcctggcttttttttcctagggtgtaaatatgtgacaataaactaagtaacaagatgatataaactctgtaatctatatctgggttattccaaagcttctgggaagccatctggaaccagggacaacagtggaaaatgatcagtggtctgggccaagtagagcatagctgaacaagagccaaagctttaatactgactggtctcttcctaatgaaggatgcaaactgcatacttccttgggcctttaaaagatgcctttcatgcacagagggaaaatgggtgatttttactgacattattatatgcaagggattactgttattgaaattatataccttaaatactcttccatctcaacctcatccatcacactacactctttagttgtgactatgttcactttttgaccgtctcctgaattaatcatgtcctatgtctcatctaatctcccttcctttgcaaatgctgtttcatatgatcatccatctctcatcacaaccctcttggttaagtagccaaaatcttccacgacaactctttaacatccttggagactcaccctaagcatcctctattaacgctacttactctccttctctacccctcctactttcaggatgagtcagatgtcccttctctcttctcctcaaacactttctatacctttttattacaatgcctatcacattctgctgtgactaccaatattttaaaaatcagtcttttactagatgaagaatttttggaggaaaaggtcactgtcttacttattctggttggattctgagtacctgatgtataatgtatcctcaataaatgttgaatgattaagtggacaatgaaaaccatttcatttaggtctctacactcattttatagtaactgaaccatagagtgggtaaaatggatatatcatttagttaaccatgggtatattctgttaagtgaatgtgtactctattggaaataagagttgaacagaatgtagtaagataaaactgctacacaatgctttgtagtactttgagcatctgttttatgtcaaatagtgtatctattgcttaacccataattaatcttcatgacaccaatgcatgtacagatgattcatttctcttagccttcatctaatgctaaagacattgttattattattcaagtacaaaattgaagatatttgtatttgcttaacctgaaaataccaaatctcaaagatcaggataaatgagggtcacgagagatttataaaaaatgaatttttaaaaaagtgtatcacttagaatgtcccataatgggcaaattgatctattaggtcaggattttttttaatgtgttttgtgatcaagaataaatgttgacagaaaaagaagacaaggagttgggtttctaagtaatttcttattacaatcaaagtaaaaatattaagttgcacacaaacctgattacgtcattttccttagctccccattagctagctcctcataaataaaaggtaaggtctaatcttattgtggtttacaatccccttcacactggcctaaggttatttttgtaacccctatatccagtcgtttagtctaacctatccactccatatgcccaatccaccatactttgatattttgttttttaaatatcttcttgtctatgaacatactattcttgccacatgatatgtcttctttctccctgttcttttgaaatctcatgtgttcttctaggtctaggtcaaatgttttctataaacattttcccttctccacttgtatctacaaacgacagagttaattgctcttcctttatacttccagtatactttatacacatttctattttacaacatgtactctcttgttaaatactaaggaccaaatattgttcatttctgtgattccagtgcctggcatagagtttgctgtcgatacgtctttgttgaacatagaataaatgattaaataattaattggcatttacaaaaactgatccaaagtgtcaacaagtattgttattgatgtcagtgatgatgatgatgataattttatgggagcaacttcaatttactgaatgattaatacatgtcaggcagtatggcagattcttatgtacattttctatacctcacattttacagatgaggagttaaggcacacagaacttaaattacttatccaagaccaaacagagagtgaatcccaaagttagaattcacacgtctgcctatctgggctccaaaacccaggcttactctcatatgatgtgtatgcattggccaatggctactgtattccagataccacattagccattttacaaatggtgtttttttatccttataattaccttgtagaaacaacaaccttgagaggtaattatcatctctgttttacagatgagcaagctgagaccctacctccagccccctccagttcaccccctacgaaaaaattccaactcaactgtctacaatctcaaacaggctacaaactatataaagtacagtgctagttgtagacatgcaacagaaatttaaaatccaaagaaatgttagaatttcaaacaaattttaacaaagaatccattgaaccgttgcaaagatccttaatacaaaaacgaaagtcacaaagtgaataaccatattaggacacttcatattctctcaattcaatagctccctaagtgggctcatcccaactttccagtatctcccaaagtgaattttttgtttcagttgggacattctttagcgtacatcctcttgtttctattcctcctttttgatgatgaggtcccctctgtctctttcatccaaacctccaaaatcaatctaatatactccttttctttcatgtctaaacttctcccttctatacaatttatgccaattattaaacaattagacattattcctattcctttatatcacaatgcattttagcattacaactttgcatttataataatatcttaacaaataaacattactcatattactttatatcattctaaactatgtgtatgtatctcaactttgcttctataactatatcttaagtatggatcatatatagtaatgacacagatgctttacacttgcataatgcaaaaaatatttattcaagaatcactctctgaagtttccctcagcaatgctttgaaataggcaaagcaaatataatttttattttacagatgaggattgagattctgagaggtaaagaaaactgcccaaatttataaaggtaatgaaggtagagtcacgttgaaggataggtcttctgatttccatactctttctataatggcttgctatcatacacatttatgatacctagatctctttttgaccttagtcccaagtatgtaatgcttaattaaggtgataaactgagacattagttactgacttaggctagtaatcaaacccctctccccagccaagggactgggtattcacatcaacatttattttttcccttgggatttcatacaactccaaaagactttcttgactcactatctggagagttttatctatgatgatggttatctgtcagtaactgggctatatgacatcacatgggaaactggatttaaagaaaccacattgctaatgagatcatcagataaatagtcattgtaagggtggggctttttatttgatgggacattctatttcaagccatattgaaagcatatgtcgtttgccagtgttgaggcactttaaagttgggtctatactgcattgtaatatacaactgaaagaaaaattcgctgatcccctgggtaataagtactacatggtttccaggtagtttagtaaactttccaagcctcaactccatattggactcatagggataaagtgggttacagttatgactatgcaccaaagcttaatgctaccagtctcatttgtatgagaaggaaaattaagagacttttcaaaattatttagccaaggcttcctggaaaatagggtttgtgctcaatgttatagatgtgcttgctgatgatggttttctttttgcttttaaacaagttgatatggaaaaaggtaaaagctctactccaccatgaaccaagcctatacaatgtcagatttgtaggaaataatgacattattgcatgcttactatgtggtagaaactgtgctgtgtgaaaatcattggacataatatctcatttagttgatagaacaaacatgtgacacgtgtactgttatctcttttctacacataaggaaactgaagttatgccattttaatgttaagattaggaaaacagtgtaggaaatattccttgcttgtagagattgctgatcctaagatgctagaggcatttgggtaatagcctcatctgtttgattgacagggtaatgtacaactcaaatgctaccttaattctagctctaaattgtaatcatctaaaacttttacttccaaattctctaagacttcaattcatttaacctaatttattctttcagagacatcaaaataaaaaatattaaataaaaatatttgaaaggaatcttgaaccaaaacataaatgatatactgaattttgactcaggtagacctggatgtgaaacctctagtctgaagctctgtgggctttggttgctatatctataagattatcccacaaattctaagaatagatgaattaaatatgtgcaatatatgtacaatgtgtgaaaataccacataattcaaatggttattgatgttattattatgaataaactgacaaagaagtaaagttacataaggaggaagtaggatgcattgtaaaaattaaatcaggcagctctcgtttgaccaagaaatttctctcctcgtgctgctaagcatacattcttgctgatctgagctgctttggtaggaagggaatggtgctcttgcagtacacggaaaaatcattctggttctctctctctccctctctctttctgtctctgatctcttcacagaccctggatgccttacattttcagaaaagtgagatctgagtttaacggaaagccagaggaactcccaaatcatgccctttagcctagctatgttgcattaagtagccaaagctgatgtgatctcacaaataaaagacatacatgctactgacccagcatctagctaagcctggccaaacagtctcattttccaacagtttcatcaaaaccaaattattagtgcagaaccaccaaatatgccaagcccaggtgtctgtactttaagcaatatatccaaataggcccaaggagaaatttgggggtgggttagaggaagtgttggaacctttggttaacaaaacactaagctacaaagcgccaatgttttcctgaaagcaaatgccaccaaatgaaattcagtcaatatatcttccacatgacaaagctactaccaacattttccttctgtaaagtgtttagactacagacttttactagccttttccagcctggtgtttctcaataatgaagccaactctatcaatgcttcaagtatcaatgtctggtaactctgtaaggattagcacccacttagtggtcaggaaaattcattccaagatgctaaagaggtgctttgtttttaatatttttaatttaagatttagtagattctatgatcacagggttatgttcctttcaatagagctcagtcatgagtaaattaaaactgcaaatcatggagacagaaatgaaagatccactaaactctctcaaagccacaaatattcaaccttagtgcattgcatttcctatacatcctaaggctgccagatggaaaaagaatggagtctgagtctcccaaactgtagcaattgtgagtcataatcatattactaataataattctcacatacatgggcattactgaatgagtggctctgcttacaggaggatgaggccaccctgaccatggagaagaaatggccttttaaagtttatggatgtgtaaaataaagagtatatgatgttgcatccctgcctaaatgtcttcataaagtgcaaattaatgcagatcctaactaggcatttggaacgctaacctagttttctgtgtttagctaatagctagcaattttgcttacacttttatcctctcattacatagcaataatgattatttagtaaatacatatgaaaggccatgtactccatagcactcctcctgagttggaaatccccctcctaatgcttccatttgaataatttagttgctgatacaccaaatcaaatatagctgtgacaggtatcccactaatgctttttttggaggctaagatcagaccctttctcagcctgttcccctcggtgattgcctggcgaaattcagggtaagggctggggacagagaggatgctggaggaaatccagagccttaatcaatgttaaccctttataaatcttaaaggtactcagatggcttgtctgatttgaaaattattaatgacactggggagaagtaaggaaaggctattttataactagtcaaatattctggaacaagagagagagtttgaaatagacatgtagaagagaaagatgtaaaatatggccttgtgagatgccacccacttcatatctggacatatgactgatataaacctttacaagtcacttgagaattttcactcctagatgcagaatggaataatagaagtcccactagaggagttggggtgaccccagggcacattttcttgtctgccaggtacacaacacatctcactgatgtatcacagagacaaatttcttaatagggtagccaagccccacacagaatgatttcggataagagtcccattccttccctatgaggagaaaattggaagccagactgggatttggaacagagtccagggtgagggcagaactagggttgttttctcctatccagaatcaggtctggcttaaagggaggggattgacagggctgaaggaagaggcaggaaacatgtctctccaccccagtgctgcttaaatgtggctgctcaaaggggcaatatcctgctctcctcttctgatgacttcatgggaagttggccgagtccccacttctgcagaagaatgcaggcagaagggagcactacaaatgggcttttccttgggtgcttaagtggcaggtgtgaagggaaatggggtgggtgccttcaatgggaggagccactgaactggggaatactgctggtccaggggctttcccctttccctcccagcttcctcccaaccccaattccctgcatcaacaaagacagtgctcaaaaaccagaactcgtcctaacacactcaggcacaggtgtccacaagcccaacctctttcacctcaacaccctgaaatcccgtttgctcttaaaagcacagacaggcccaagtagactgagaggtctgagccagcacatccttgctactgggaattaaaaaacaccgtgatgtaaagaaagtggtatttgtgacactgtagtgctttaacaagaaaattgggggggtagaggagggtgtgtcagcaggtttcaaagcatcacaatcagtcctgatgtgtttgggtaaggcatggaggacatatctctgatccctgctggtactctccagtcccgcatcctcccgcagtctcttgaaagtggttagatacccgggcagggccccgcgtccattttgccagccaggaaccaccgagtctgggaactttgaaagccaggggatgggggtggttgttgccaaggctcggatttcggcgccagagttctcagccaggaaagcagttgaaaatcaacacccatctgcctcttctttctcatcccccaccactttttccttcacccttctaggactgcacacagatcctaaccacccccccccgcaaaacacacacattcacacacccttgggctgagaagatttttgattctgaaggcggcaaacccgcagaactcaaagggtctcgccacccctctctctgccccgcggctatatacaataaaaccccatacaccccagacatcacaacataatccaaatcagccagtgacttcggcgcgtcccgtacctgatatgcagacgatgaaattggcttgaagaagaaaaagcacctcccagactatttccatcctctgattctcattccaagtgcatcactcgacgggaaaacggggggaaggggggagcccgacacggcacacacacatacacactcgcacacacttccgagcgagtgcacactcgcactcccacccgacagccggccagggacagtcacccccaagatcaatatcgcagtttgaattgttccggcaaatctcccctcgggctcgacggatgtgcgccccagatgtgctgacacatgtccgatgcctcgctgccttggaggtctccccgctcgcgtgtctcttctcttcgcaccagcggcggaaaccgcactagcagcggcggcggcggcggcggcggcagcagccacctgaagccaccaacactgggctcttccagcaaaaacgagaccccgattcgtctggcgccccaagaagacatagacgatagccccccgccgggctgcgccgtgcaattccgggctcccgggagcgcgtagctcgctggctaagcccaggcagtccgcggcaagttgccctcgaagtccgcccccctcaccggggcatggtcggagggtggctgctgcgctccggggcagttcttctcctgcttccggggggcggggaaggagcagacacagcagacacacagagaaagagaggcagggattattgcccgaaaccgccagccgccggcagcctccgccgaccctccctgctccccaggtccgcgcgcagcctgcagcctctcagccgggttccggcagtgcgtccagggcgccgaggggaagggctgggccccggggactggggcgcggtgggggcacacagactctccaggtcgcgcgcgcccttcctgctcctctgctattttcctgaactccccagaacccccagttgcctggcttccatcgcccgcaactagcgccgctgtcgagattttccgcaatacaactgcaggggtcgttatttcctcgcctacggatccctacgcttcccaactcagagaggaggaggacaggtgggggcgggagggggaggaggagaaggaggcttggccaggtgagcgtcctcgccgccgccgggcgtcccagcgtcagctccgcagcccggcacccgggggcggaggcaggaggcccgggcggggaggtgaggctgagcgcggccatgaggaggaggaggaggaggctgggtgtcacagcttcaggccaccttggccgccgcctcggccccagtccctggcagccgcctccgcactccgccccgccctggctgcctctgttaccctccaggattttcgagtttctcttcttaaaaagaacttcgtgctgcgggttcggcgcgggagacccaggcaggactcatcctgggagtgctgtgctgtgctctccctccgctgcgaaatattggagatttttttgcataattcattccctgccctctccatttcgtccctctcatgccccccaccctttacccctttccgtgccagtgccagaacactacttaccccagagttcttttctctgcaggttcctagaccaggtgcaactcttgcctgcaagtccctgcctccctcctcccgaaaagggggaacaccgcctttccaagtccgggtgccagcagcggctgctgccaactgcgccttcgcccaactccaggaggatccgggactattggaaacccgggctttagaggaacgggcttcccttcttgtctttcttttattctgcttttctttagggaagctctagtgctttggaggcttttgctgggctccaggatactttccgccaacgacactcagcagcttccactgaaggagatttccccaccaaacccgcgcgcgcacacacacacacacccagcgcgcggctctccagggccccaggggaaagtaggggcggcgcgagcaccacccacccacccaggccgaggccaggggcagccagtccgcagaaggtctcgtggggaggcgggctgtctataacctaggaaagacttgcacccggttgcagtgtggatgcaggggaattgaagaaaaccctgtgctcagaactgcttgcctaagagggctgggaacgaaaggggaaagacaaaatctcaacagatttgtctgcttccatcgctgcagtggtggtttgcgaaagctcaaacctacctctttggggttattgaagaagaggagggagcgtagagggaatccctgggaagatccaggatttctcggcgcgcttgtcccgattgggaactgtgacgttaggagattttgcacaagcgcggatgaacacacacataacaaacacaaacacacacataccccgcggggattttttatccacttttaatatttgatgtttagaagctatttcagtataaacctcggtctaagaactgcacaaagggtagataagtggagatggaggaggggaaggaaagggtgcccgttcatccgcacagagtcaatctagtgaatcttcccgtgttgatcccagcacccaggctgtgcgacatctgagggtgcggagtgggagctaaaggagttacattacagtgctcccagggttcttgaagggactccaactgcccaggagtctggcgggtctttttgctgagtggcggggagaagagggaggaaaaagagagaacgcagagcagatcagcagctctctgagctgtctgggctgggcggctgcgggagccagagctacgtagtcccaccgactctagggattcgaaaaaggaaccgccgacagacctgcctactcttaaagaaggagatgtggccgtgagatctgttctgtgaaacaaaggccaaggactctaggtggtcaacacattaaaaatctaggcccagatgaaataaatccagcattcttatgtagagagcttccaggctcagcagggaaaagcatgaaacttcagaacattaaaagaattccggatagtgagaattagcccatttgggaaatatatgggggcatttgtctccgtgccttgaaagtagactgcatgaagaattattattattttttctttctttctttctttctttctttctttctttctttctttctttctttctctcttttttcttttttctttttctttttttgaggagagagggagaaagaaaaaaaaaaaagcagtctgacaaagatgagcagattccagcctggtgagagttcagaaccgtggacagcgacctaccatccctgcttgggtggggagataggctggcagaagaggtctctcctctggaagcagaagcatggtgcctgaatttttatgtcactacccactcatttactaatgaattctgcaattattaagtgtcttatatgtgtcaaacactgtggcaagatgcttgggctttgtaattgaaaatgcattatccttgctttcaaaaaaatctgcagaccatatatccctctatattctgctttaagagccaatgccagtaaaataatactttatttccaccctttcagtctgcatactcacctccagcattcccaaagaatatttaatctgtgatctgccactaagtgctttcagtttttaaaaaaggcaactcacatgacagtatttgttagtttaaaaaaagtttgagtgtattgattgttgtgtgtgaagtattatgtgtattgattgttatgtgtgaagactatgtgtgaagattctgaatcccttacataaattatctcatttaatcatcataatgtgatggtgagataaatgtcattatcacttcccttttactgacaataaaacaataccagggtagttatttgcccaaggctccacagctgcaaatcagtagtgtagagaccatagctggaaagtctaaactcagaagtcatgtcacaccacttccttatatgctctgtaaaatgaaaaatatcatcttggggaggttattttgcacttaaagagaacagaagtacacatatgacagctggaagttaatcaaaggtggtattaaaatttaatggtagacaatgcaatttagaacccaactacattagttgggataaggaaaagatcactgggaatcagaagtaatcaaaagcgtttctaatgatagaattttggcacctgctagatgtcagttctggttctggcacttggaatacagcagtgaacacaatagtccccaacatattgattccatactagcaattgctagaagaaagagccatacatttttgagtcatttctaggctactacatttctagagtaggttgctatatgtttttctgagaaattcaccatcttaatacagaaaataactcagtaaaaaaaaatgcattaaatagaagcctttaaatttaagtaaattctgcctctcttttttgttgtttttttagcccaaaaaacaaaccaaataaatgtgggaaaaaaattccatgaagctagaaaatattcttagacgttttcatattttaatgtgcttatatgtatatctaaataactacaaagaatctctccacatcatacccgcctttatcttttgttcctttcctactcctctacatttctgcactacaaatcaagtgtaagtatcttacacatttaacagagagtcttggccaagcccacccaagtgtgagagataccaattgtcctatagaaagcaaggaattatatttccattttccaagagagaataatattaaattcctttgggttcttcctgtaccttctctttcactcaacgccatagaagaagggatgactcaactgatgataaacttttaagagtttgactttcattagggtgcatttatcagaggccaagcacactgtattagaagacaaaggaaatctatacctcttcccacttctctattttcttggtaatgctaccttcaggcacagtgagctcacaattttagtgtgtgtacctatgcatatttattttgtatgccactctcaaagagcagagctagtaaggtctctgctttcttgcagtacttagctttctggggccagtcacaatcatgcatgtggctgggaaagcatatttagagccttctttgtagacccaaccatccttataagtgatgttctagttttgaatttggggtgaataattggaaaatgccacttcaaaacacatcaagctctatttaaggactgtcccattcccatttagaaaatgtttctatttttaattgcttagatgccagagggaaagaaaagttagtgatgaagctacccctaacttctaccaaaaagataaaattacccaaataaatggaaagatataccatgttcatgaatgagaaagctcaatattgttaaaataccaattttccccaaactgatctatagagtcaatataatcctaataaaaatcccagcaaatttttaaatagaaattgtcaagctgtttctaaaatccatataaaaatactagggaactaaaatagccaaaacactttggaaaaagataaacaaagctggaatatttaaattatgtaacttcaaggcttataaagctatagtaatcaagacaatgtagtacaagacaatgtagtagaatatagacaaatcaatagaacagagagagtctaaaaatagtctgacatatattgattgagttgattttcaacaaaggtgcacactcatttccttggaggaagaatagtctttttaacaaatcgccttttcaatatttcgatgtctatttttgagaaaaaataaagatgaactacaatccataccttacactatataaaaaaaagatgaactcaaaatggattataaacctaaatgtaaaacccaagcctttaaaactactcaaaataaataaaagaaaatctttgtaagtttgggttagacaaagattttctacagatgacactaatatcattattaattaaaaaataattgaactttgttggaattaagaactaatattcttcaaaagataattttaaataatttttaaaagtcataatctaagagaaaatattgggaaattatatatggcacaaatgacttgtaagcaaaataggtaataattctcaaaactcaatttattaaaacaaaaattttaaaatgggcaaatgatttgaatagacactttaccataaagatatagtaatggcaattaagaatatagaaaaatgctcaacgttattagtcattaggaaaataaaaattaaaactccaatgagataccagtatacatatattagtttggctaaaactaaaaacaaagcaaaacaaaataaaaaacaataccaagagttggtgagaatgtggggcagctggaactctcatgcattgctggtcaggtaaaattatgcaacgactttagagaaatgtttggcagttttaaaaaattaaatattaatatatataaagcatatgacgtcgccattttgctcatagatatttatcctagagaaagaaaagctaatgtttatatgatacttttactcaaatgttcgtagtcctttatttgtaatagacataactaaaaacaacccatacgcccatcaacgaatcaatagacaattgaattttgaaataattatgcagcaatacaaaagtaatgaactattgcaacatggaacaacatggattaatctcaaaattattacactgagtgaaagaagtcagataaaatagagtgcatatagtatgattccatttatacgagattttagaaagtataggctaatttacactgacagaaagcagaatagtggttgcctggggaggcaggccagaaaatggggaggaatgggagggagagactggaacagcgtaaggaaactttttgggttaatggctatattaattatcttaattatgttgatggtttatgggtgtacacatatgtcagaaattatcaaaatatacattttaaacacatgcagtttgttttaggtcagttatacctgataataatccagccaaatgaatgaattagttttttgaaaatataaggcagaaactgtaattataaatagatatttttaaaagtgtggctggactaggcttagagaaactcaacattaccgaactgttgtttctctgcacaagatgttacttactactaaattacttaaactttgagaaatattaaaaggagttgtatgtctccgcaatttgtaagctctggtgtaaaacaaatagctctgatgttgtagctatatctttatctgctttacaggtattggattattatattataaagtaattatcctgttggtaccatagggtaaaattccattattaactgggcagatttcctttggagacagtggaaaatacccaggtttgccagacttggagagaggcagatcttgggatagaaataaagactcgaaagatgagccttagactgtggcttagcaacaaatgctttgttcattgagcaaggatgataggttaaagtgtctatgtacactcgcgggcatgtataatggtgctgggaaagctgaatactgtgattgggttgtgggctgtgagctagtcagggaagaaggctttataagacagaaatgtacactgaagtgacctaataaaattggcaatgtaactctgatctgagagtaatcacatctggtaaccagtgacaagttagcctcaatgttattcctttctaccagctcttcagataactatttataaacattgtaacttattttggaaaaattccctgcaaacgcatggactaaaatgatgaggggaattgccagagttctgaaaccaatgtggagatggtaggagaagcggaaacaaaccttggtggtacctcaaatcatggagtagaatggacagcgacacaaagggcagacctgtggcagaacagaggtgggggatggtgaagacactggtgataacagggattatgaacagatgaatcaaccccgaagggactccccaagagttagtagggattccaaactacctatctgacaaggaattaataaccaaaatatataaggagttcaaacaactcaatggaaaaaaatttaataatctgatttcaaaatgggcataagatctgaatagatatttctttaaagaagacataccagtggcaaatggctatatgagaagatgttcaatatcattgttcatcagagaaatgcaaatcaaaattacaatgagatgtcatctcatcccagttaaatggcttttatccaaaagacaggcaataatgaatactggtggggatatggagaaaagagaacttcatatcctgttgtttggaatgtaaattggtataataactatggagaacagtttggcgattcctcaaaaaattaccatattttttttttagttatgcaagtgattgccattgaaagtaatggcaaaactgcaattacttttgcactgacctaactagaatccagcaatcccacccttaaggtaatacacccaaaagaaagaaaatcagtatatagaagagatatctgcactcccatgtttatagcaacactatttaccatactgaagatttggaagcaacctaaaggttcattaacataagaatggataaagaaagtgtggtacatatatacagtaagtactattcaaccataaaacatatgatagcttgtcatttgacataacatggataaaatcatagggtttttttaaatgaaataagccagcacagaaagacaaatgttaaatgttctcactaatttgtgggagctaaaaaagaaaacaattgaacttatgaagatagagagtagaatgatagttgctagaggctgggaagggcagtggggatggttaatgggcacaaaaatataattagatagaataaataagatctaatatttgatagcatagcagagtgattacagtcaataataatttattgtacatttaaaaataacttaaaaagtataattggagtgtttgtaaatgataaatgcttgaggtaatgggtaccctatgccccatttactctgatgtgagttttacacattgcatgcctttgtcaaaatacctcatgtactctttaaatatatagacccattacatatccataaacactaaaaataaaaaaattaaaagatattcagtgtagacgaaggtcaggtggaaataaaaacactgaagaaagtgtatgaccattatatttttaaaaaaattaatagggaaataagaacttcaaaaggaggactagtaatctgctatccagtgtgaagattggggctgtcaagctgtgtattagcttcttatatctgctgcaataaattattacatacttagtaaaataacaaaaatgcatttatttatttattatatatttatttgtacttaaatttactggtttatcataaaacataccaatgaagcggtagataggacaaggtccagaagggccctgagcccaggagcttctcccatggagttaggatgtgccacactctcagcacatggatgcattcgccaaccataaggctctaaaacaaaaaaatgtatctttgacttctgaaggtcagaaatctgaaacaaatcggcagggcagattctttgtggtggctttcagggagaacatttttcctgcctttgctgtcttctagatactgtttatgttccttggctcatggctgtcttccagaaatgattttactctactttctgctttcatcctcacctcttctcctctgagtttctcttttccttataaggattcttatgactacattgaacccaactggatatttcaaaatagtctccatcacaagaaccttaatttaataacatctgtcaaatcttttttgccatgtaaagtaacacattctcatgctccagggattaggatgttaacatctttaggaggtcattattctacctatcacaagcagattgatttgggtcacatgaagagtgccaagtgtagatcaatggagcttctcataaagtaattgaaaaaaaaagctgccactttttaatctatacagtaatgtaccttacatttttcaatagtgagttcatgtgagttatttgaggaattggtatgagaccttgttctctataaatgagtctatcaagaggaaatgttaaggtatttgagtggatacagttcatttctctggacaaagaatgtgaggatgctgaaatgacacataccactaggagaatagattatttacctctctttgatatcggaatagataatagtttaattaccaccagtgctcattatattttcaaaataggctttcttctcacccatactataatttgtgtccaacgtcaaagaattaaaatgctataccttatttactatttatattttggcagatggataaagaatttgatgaaatagttcacattaagattgtggcacttgggctaaggctttgggcatcattttgaaagttagtgaaactcatgttacacttttctcctttttattgaatttctctcatatatccagtctccttaactcaagatcttaaaaatggaagacttatttgcaatgagtacatagcaggcattctgtaaaagattgctgaaaaattgaataggtttgtttatttgtttattcaaataaatccacttttcttccattttttgtaatgaatttgatgataaatgtttcctaatacattgtaagtgcacattaatatactttcagtcctaatgtagtccaacccccttattttttatgtgggaagatggaggcttaagattaggtcaagtgatgtgtccgagttcaacaaaggcaaaagcaggggcagggccagaatttcagccttcctagttaattattagtttttataaaccttccattcccatcattatttcttttgtgaccaagtaacacagtgcaacagctgaaacatagatggcaaatgtattagccaaaaccaggcattttagtgggagacatttttcttagattgtctctttctgtccaatgcactttcaactctacctgaccatttgtgtgtgtgtatgtgtgcgggtgtgatggggtggtgtgtgtttattttacattaagcaatttccagtgaagttttataccaacaggaatgcttcgctcttctctgtgagccaactgccctatcgggtagcagttatagatcagtatagaatattttagtttcataatggttcttaggtataaagaaaggcttaaattagcacaacagtctgctttcactacagcttgcataattttggagttagcaactgacacattaggttttaaaactatttgctgagattatttttttacattgtcttcccaatgattagcattaaaattacaagttttaagcttcattttgcacttgaaagactctttgtagttctctactcagcaatgtctacatgctagattatagagttatatgtctcatttatttattaggaaaattaacaaataatgggtgtggcagacatatccactatgaaaagtcagaggtatgggacaagagtcttccctcccccaagcccatggccccttccccttctctttctgctcctggccactgcttccatggtcaagtgattcatgtagggtctttcatgtttgtatgagatatctcaggatcaagtgccttaagaccatgcttttacacacatctccttaaagggccattctttgaccacaggttcagtcctgggtatgcactcaccagcattgcagcctacttttggggaaagagatcctcccagccccacccaaccaccacaaacacacaccttaacagtattaaacatcaaatccttggtgaaataacatgccacttattcagagcattgaggaagttcagcaagggaggaatactgcaactggagggctctgaaaggaattccatttccaaatcaacacagaagataagaccctgctacagagatctagttaattttcttctcctgcaaatgagatttcctgaattgtatccagcttcaacaacagatttttttttctcattggttctattgtgtggatgtaataaagtaagagttgagttaccatagcagaaaaccctcaaatttctgaatccgttctctgattgctactagatagagaagaaaactaacgaaaacaaaaagagcctcctgcccagcaggacaggagatattgtgagtagccataattttatgatggagttaacaacaattgagatcaaaggttgaaagagtagagtttttcctacaaaaatataaacatgccattgtcaggtattgaaaaatatcaaggttgttgtaaatgtcacataaacatatgactaagtaatggttcttatctcattagttcaaatgctttccttaatgaatcttttgagacttgtatgagttaatattacatataagatgatattccattttcatgttccataaattattatttctttaggaaaatagatttttaaatgaatgtgaatgaaatcttaaatatattttaaatgatcaactattaaagtaaaaacttatattgttttcatctgtgttcgcccaacttttcttatgataaaatagcaatttctggtggctgtttctcattttccttcccatgaaatgggaaacagactggcaacctgccctttatacttcagtcaatttttgctggaaataaaatgagcagaataagctctattttctcctcttgcataagtacatttcagatgaagatggtagtaattttggagatgttgccataataatgtttgagttattggattcagctcaaccaataatcacttgagttagcttgttggaaagttctcaataaacaaagataaataatagggctttctatcaagtagaaagtgggcgctactctaaaattcttctcatttaccattagacgttttataagattttcaaagaaaaattgattttaatatactctaattacaacggctcttaaggaggtgtagggggcctgggcatagtggctgatgcctgcaatcccagagtttcaagaggctgatgggggaggatcacttgagaccaggagttcaagaccagcctgggcaacatagtgagacctcatttctacaaaaatgaaaataaaaaaattagccaggtaccatggtatgtaactgtgttccagctactcaagaggctgaggtgggggggttgcttgagcccaggagtttgagatcacagcgagctgattgtatcactacactccagcctgggtgacacagcaagaccctgtctctaaaataaaataaaataaaaataaaaaataaatttacaaatgaggtataggggatgaaagtgtcacaaaatcaaatggtaaaaagtttgaataagggtcattggtataaggaatagagtctctattggttcagggactgattttatccaaacagtttggcagctgagctctatcaggatagcctcttttcacctcctgtctaccagctgtctatttgcaaccagcagggtgcaaccttgagtcaggctggagatgctttgtccatatggaaaagcaatggccaaatttaaaataaaggtacctaggggtaagggaacttaagaatctcaatctaaccattcacactgaggggaagacatttcgggctactctggtggaaacccaaactagataatgcagatccaaaaaaccaagcagagcccttccaggaacacaaacaagttatttttcagagagaatttaaagtagagaattggttgaacaggaacacaaacaacaagttatttttcagagagaatttaaagtagagaattggttgaacaggcattggaggactaaaaagccaccatgaaacaccaagttaatgcagagagaataactctaggaaacagctaccaccattataaccagggagacaacataaacagattaggatgatcagaaccaagaagcctggaggaggggtccctgatgatctaggaactgtacctcgcaagagagggtgcatcccattggactggcatcttagagctcagaggaggagctgtaactcagacctctgagtacagcctccctctcagctgacactgaaacctagtggaagctggttctgagacttttggaagaaactggaaagtggaagcaactgcttgctgaagtgaagagctgttgctgggagataattgcaaaaccagtatggaaaactgaatgaatcaagtcctttctttgcacctcttgttttctaggctccctctagcactccctgttggcaaaaacctaatagggagcaaattgacaaaagagaaatgtgcttggtggagatccagcaatagcatcacagagtatggagggactgggaatgaaaagaggttaggcctggtgtggtggctcacacctgtgatcccagcactttgggaggccgaggcgggcagatcacctgaggtcaggagttcaagatcagcctggccaacatggtgaaaccccgtctttactaaaaatacaaaaaaattaggtgggcatcgtggtgtgcacctgtaatcccagttacttgtgggggctgaggcaggagaatcgcttgaacctgggaggtgggggttgcagtgagctgagatcatgccactgcactccagcctgggaaacaagaatgaaactccttctcaaaaaaaaaaaaagattataggttaataactgtcacacccattaattccgaccaagacaagacttgagtgacagaaaaattagcctctaatgttgtagagctacatcggctgttatagtgcagggttttcaggatgaagttttgctcctcagaagcttttcactgtgcttgatattgaaccagtgcacttctctctcattcaatagcagttctgatatctaacccacaatttcatatgtatttggctttccaaaaatctgcttttgagctaagctcttgctaccttatgaaactaagcagcctaccccacagcctcttttctaccttcaaatttgtcattccacagctttggcttgctgtcatcacagtaaatggctgagccttccttacaatcacagtggggactagcccccaaatagctgatcacaccaaggatgttgcctcacttccatgtccctagaacctaccagaagacaatgttaatgataaaatttaaaaaaatatgttttctgattcagaaacttgaccctgaggtcatctgagttacagaagcattgctgccgatctgcagtttcagaaaccattataggaacccagaagaggaatgcccaatatcaaccatgtatttgggcaaattttgttgaaagaaatgagttgccttgaacttaaagatgtgccagcctcaggcactgtggagaatacagtggataaagaggcactgcaccctgaatcagaaggctgatgtttgaatctgaagtctgccattctctacctatgggattttaaaagacacttaagtgcttgagccacaatttcttttgcaaaaacagaataaaaacatattttatatagattgagacaatgaaatggaacagtataaataagaaacatttaacacatcatagataataattattaattcatctaattctatatggaattgtaattggaaaatgtaatgtgtggtttatgaaacataccaatcaggaatttaaaaagacattatttaccagatgtttaatgtataccaagtcatggttctcatgcatcttattctatatcccttccccactcaccaatatggcaccatgatctttgattatctggatgggaatggggtttagggaaggtaaagtaaaatggaatagattattattcaagcagacatttctgtgtaaagcaaatatttatttggcattcacttaacaagtctttcttcttgttcttatcagagaggagaaacaccagagagatgagtttccaagaactgtaataggaatcaaaagacatgggttgatgtcactgctctgcaatttagaagttatctgggaaagttacttaaccttttccagcctccgtcttggttgttgttgctttgttttttgactttgtaataggtgaattactatctaacccatggctgtttagcagaatgaatgagatattacatgcaaagtacctagtacagaataaaccctaaaatccctagtgggagtcattattgtcagcccctgagcatctagtgtttgtggactttggaatcagtgagataaggacttgggtcttggccttgccacttattggctgtgtgttactgggtaagtcacttaaaatctccaggtttattttcctcatctttggaacaaagagagtaatactgagtctccttaccttacagagttactcagtggtggatctgatgaaaaaaatcagtgcgaaacactttatacatgtgtgcttatgtgtatatgagtgtacatgtgtatgcttgtacatatatgtgtgaattcgtatttatatgtatatatattcatatgcatatctatctatatacatacatacatatacatatacaaaggcctatttcagatagtatcttagtattagataatgtagctattataatcctgggactggaatttactgattaaggcaaggaaagggcatcgaaatccagggtctgctgtgacaattgagggatgcaaatgtagcctctcatttgtttcaaataaacattaatgtctttattccattcattaataattaattgctccaggctctgattcttgtataattgtaccttatgaaagtccacagcagagaaatattgtgcaaaatgcaaaacaccaatttcatcatgagtaataaaaattcaattaagttcagaataaatgtgtgagttagtaaccccagcttaacataaagctatggaatgtaaatagattttggaaaacaaaataactagggtgtgacaatttatcaagtgtactgaaaacccatcattgctttctacacgctggcaagaaaaggcccacattacaagagagaataatttttgacatttttattgtgctttatagctggaacattccaacaaggaggttgaatagaaaacttcctatacagcatagcctaagaaaaaataaaaagtagacttcccagagttattttttccatgtacctttggtggggcctggaattttgcagcattgattaaggtcttcattctagaacaaagtgatcagggtgaggtgaataatatgaccactaactagaatcaaggtttgagacctggtctgcactcaattaactatgaactaagtaattcaatatgtcttatcttcaattacctatcagcaaaatagagacactaatgatgtttattgttatgaaagcgttaaaatgagatatttagtttaatcactttgcatatgttagggaacttatgaatgttatgcaagagatgaaattgtaatttaatttgatgatttcagcatgtttcttttttattcatgcaaatcaaaatttgcaagttgaaataatttcgctcttcaaaggaggaacttcagaaaaggatttttccaattttatcatttctcaaaataatatgggaattcctatttgaaaaatgaattttaaaagtcatgttaaaatgaagtagccatataacagtcacagtgatttttttaagtataaaaaagtattatcaacaagccttatcactcactttcttcagcaatcttgaatttgtcagtaataagtatattctaaagaatgagccacagactttgaaagcagcttctaagaaagtatttcataaatgctctgaataatgataatgtgagtaaaatctttgtatcagagcaccttgggactggaacagacaaatcagaccacttcctgcagctgtctatttttgtgttaaactactttctacagccgtgcttatcaacggttgtccaggttatacttggacatcttcaataattgtagacccttgatttcacattgatgtccattctatttttggttatttatggctattaaagccatttctttctttctttctttctttctttctttctttctttctttctttctttctttcttttttttttttaaagacaagtctcacactcttgtcccctaggctggagttcaatggcgtgatcttggctcactgcaacctctgcctcccaggttcaggcaattctcctgcctcagcctctcgagtagctgggattacaggtgcctgccaccatgcctggctaatttttgtatttttagtagacacggggtttcaccatgttggctaggctgatctcaaactcctgaccttaggtgatcccccccgcctcagcctcccaaagtgctgggattacaggcatgagccactgcacccggcctaaagacctttcttaaaatgaacttagaatctatttttctgtaacttttttttttttttgatggaatctcactctgttgctgggctggagtgcagtggcacaatctccgctcactgcaacctctgcctcccaggttcaagtgattcccctgactcagcctccggagtagctgggactacaggtgcccaccaccatgcccggctaatttttttgtattttagtagagatggggtttcaccatgttggtcaagatggtctcaatctcctgacctcgtgatccacccgcctcagcctcccaaagtgctgggattataggcatgagccactgtgctcggcctataacttttattccaaaatgttcatatattcaggctctacccatgctctatttactcctttttcaggtggtgatattttggttttcaaataattttatactcattttttaaaagataaagagccccgttaattcaacctattaaagaggatgtagaattaaatgcaatatttctagtgtggtctaaccaaaacagattggatgtgtgtgtgtatggatgtatgagtgagtgcgtgtatatatgcttttgctttttctagaaagtgatgtttatttatttattcaataaatattaattaaggtctttactatgtgacagacactgctacagatagtaaaacattggagatgaacataatagacagtttttttaattctcataaaacttatattgtagttggggaatagtaaatgtatcattatatgattatatatcagatagctaaatgagaagattaaagtagaataaggtaacagagagtggtggggtggtggagagcaggtagctctttgagatcaagtgataagaatagattttgctaaggaggtaacattcaaattgggacctgatcaaagcaagggatgaagtagcagagtccaaagagcatttctggcagagttaatagcaagtacaaagacccagaagatagtgaacttggtatgaaaaaccacaagacatttgtgtagctctcctagaatgaacaagaggaagggtagttggaggtgaggtcagagaggtagactggaatcagatgctgtcaaaccttgtaggctatggtaacgtgttggattctattcctacagggctgtagaagtcatttgagtgtttggctcaaaggatttattgttttgagaagattgctggctttatctccagtgtagagaactgacacaggtcacaacaaagaggaggacatggcctgtggaagcagagagatcatctgagagaagctacaattgcagactagggaagagatgttggggtcatagactagagaaagcggttggatttggaatttatttccagggtagtgtctacaggatttgttgatggctataggggatggaggaaaaagaggaactaaagattttattgtggaacaaagacataatggttttgcaaacaggcagagaatcggcagtttcaaggaaaagttttattgtaatgtgaaaaataatatcctgacatatcccactgatagcccagcatagccaccgtggcactggactagaactcagatacttttctgagctttgccacttataattttgccttgagtaggaaattttccatctctaggtactccagtttccttatatgtaaaaatgaaagagttaaattagattctctctaaaggtccatttatttcatttgtactatgtctctaaggatcaaacaaaatctttgtttgctaatagatattttgaactcattagtgacattgcagcaaactttgcttcataggggcctgtaaggcaaatatttcccaaggggaaagtgtatagaattccattaggaatgtactcaacaaattgaaatgtcatttaaagcttacaaagagtcccattttgatgacctgacctaataaaacaaagtgaataaacaaaaatttgcctcactaatgcctgggcaaagggaagggactcaatctagttattatacactgctatgtgtttgacaatgtttcgagttacttcagccaaaagtttaatctaaaaagtcagtaaatgtttgttcagtggggaaagaaacgcatgatgattgaattacatattacagcttcattgattgacaacaaaagtactgagctatttggtctggtaaattgaaactctgttgcataggaataaaacgaaaagaggaaaccttgattacgtaatcagagcatgttaacacattgttatcatttcaaatgtgtggcgttattttgtttccttttgcaaaaaatcaaaaatcaaaaaaaagccttggtttgtttatacaaaagatcctataggtgaggatcatgaagtataaataggaaggcagtaatagctaaagatggggtaaaggtagaaaatgggaaacatttgggcaaaatgagagaaaaatccagggcaggaaagtgggcaaattgaatactatgctacctctttttcttcagctattatgagttagtaagagagaggaaataggaaataatctttccataaatattgtaaatttctcttaataactgcttaactcttcttgcacagagaaaaagttaatttggaagctttctatgtaaatcatccaaatacataaaaagtgaatttattttagtgatgctttgtcattatttttttcagtcagttgttctcaagctgtaatgactatgggaaccacctgtggagcttgctaaacattcagacgccaggactttatcccccaaagacggactccatgtgtcttaggtggggtcttgcagcttaccttttaacaaacatcccaggtgattctgaagcaggtggtctacagactacacttaattatctgttttttttaggaggcaacagagtatatagtctgggtcttcccttttattgtacctaagctgaaaaggatactttttatagtttagggatatttatcccccagagattctgtagacagaggaaaactgtctctgaaattacatcctcaaatttgctgactggacagaacgcaatgtgcaatctgagaaatgtaccaggacaatgaaggcatacgtgaaattataattcaaggtaagaaacattaagtggaaaaaaagctgccttctttttttttttttttggagacggagtctcgctctgcctcccaggctggagtgcagtggcgcgatctcggctcactgcaagctctgcctcccgtgttcacgccattctcctgcctcagcctcccaagtagctgggactacaggcaccggctaattttttttttttttttttttttttttttttttttttttttttttttttttgtatttttagtagagacagggtttcaccgtgttagccaggatggtctcaatctcctgacctcttgatccgccggcctcagccttctaaagtgctgggattacaggcgtgagccatcgcgcctggccaaaaactgcttattttatactactaacagcataatctgcaataaaagataacaattgtaaacatttatgcaccaattaataaaatgtcaaatatatttttaaaatgtaacttttgaaaatagaaaaaattaaaattgtgggaggttttaatacaccttatcaattgtgtaattggagtactctagcagctaatttcatccattttcttctgtatttattctattaaaggcaacataaaccttttattgattttagtaaaaacataaaaaatacctatgcttagttaacttgtattgaaaagcaaagcatagaatgtgagcaaaacaataataaactgaaatgatatttatttgaaacaaaagcaaaaaggaaaagccaaagaatagtccagacttcaagttaattaatggcatgtaacaatgatttaaagagagtagttctcagcggcttatatgccagatgtaaagagtaggttctaattgtctaaatgggcttttggtgtttttcctttccccttcctccaaatgtagtcatatttatatttatccaccataaattcatgaaatgtgtttatgtgtgcactacactaaatggaagaagaaactaatataaataaaaaacaatgactaataaaaatcatttttacttgctccagaagaggtcagtaagtaaaaaagcaacatagtctttgataacttccttgctttctggtctgatgaaatgctacaagctcatctagtacaattcctgtcaacaactctcaaagagtcctgataatttgagaccatattctgtatgatagaggtgttcaatgctcctaggttggccaaaatttctaggtctttacagtacacagaatcagaaagggaaatatatccatacatgtatgtatgtgtgtatatatgtacatgtgtgtctgtaaacacacataagtgcatgtttatgtttgaagataaaacacataagtttatggtacttcaaaataagcttgcttgggctactaagttttaaattagtttatttaagcttagatctatccttcattctttcatcaaaaatcttggttcccaatgtcagcaacataagtattaatttttgaaattctaaaattcatgtcagtctcagaataacaagagtaccacaaatgtaaagatatgttttccatatatgtaatagtctgctgtccttagcatgtatcttactagagatattcagtataataaacatgttttgaaagcacatgaaataattctcctatgtatagtgatgccaccaactcaatacacagttaggttccttgatttcattctgatttctagttttaggtactgcttttatatttttattttctaattatgttaaatacatattttatcccaagatcaaaggtataaaacaagatttatttagacatttctaacttgtaatctcagtcctctgtattctctttctttcttcctgcccccacaggttaccattttaattttttaaatttttctgtgactctttggaataagcaaagcaaacacacacatctttgcatcccttttttctaatatttttcttcaccttgatttggttttgtttaattataaaccatacagacccctcccctccataggagtatatagaggaactattgtattttttatactattaaaaattcctacctatagcacaaagcaatctcaaaattaataaagttttttaagttaaggactttgaccaaattccaggcccctaatctgcaattagtaaacaaaacagcatttgagagactccaggtttgtactgaaattcataccaagaaatccagttttactggcacttctagagatggactttgctgctcagtacatcatcttattcattcatttatttattttgaacaaacaaatgtttattgagcacttcctgccagtatcaggcatgctaaaatatgcaagatgctctctggcttcaatggttataatgttagcagaggaaacacacccatcagcaccttggttcatgtaataagggcttggcatctggtgctgaagtccctctttgtccctttctcttggcgacggcaaagggcatggaggcagaggcaagatggaagactgcacgtggtgtcagcttggtccctaaaagttagtaagtgcatgtccgcagctgacttaaatgtccaagaagagacaggggtagacatataatacctatcaatatttgtcttctccccaccccctcccaggtaatttccttcctgtagtgctgtttttcatcttctggctcacacctttgctgtaacagtcagactctctgcagtaagtataaccatctcggactctcactccatttctattagtttatcattttaaacgtctcctttaaatgcctcccccctcccaccacctttcccttcctctgatgcatctcttttatagctttccagtcatccctgctgtttactcttttattctgatgtaaccaatccggctcacacaaacccaattcattccaaaaggggacttaatgtgccataaaactaacagggagattgctctcaaggtgggcaataagctgacacagcacacaggtaatatttatagggcaatgctacttcctgaaataccagccactgcactgcttgcaaatcacagggtaattatctgcgttaggtccttaatcactggagcaaagccctttgttaagtaaacaaatatactgaatgtgagcctggatgccaaagaaaatgagacaagggaaagacactgtgccggggtgaggtgagaaaggatggagggggaccctccctgcagttttatgggggcagtaaagtacagtggtcaatgtgagggtctctgaattcagacagaggtttaaataatgtagtgaccttgggccagttactaatcctggatgtgccttggttctgttccacagaatatgacccaaatactcccatctcatgaatttatttgttgaggtgctacttagataaagtgctgacacttaacttcaaggcgtttcttcttcttaccaatatcatcatcatctttatgttcatctatcactaccaagtttttcttcttagagacctttctttactttgggaagacccagaagaaaccacaaattgaactgattgtcacatctgttcctatcctgtttctgcagagaagacctagccactgagactcacccttgaagaaaagggtcacaggaggcacactgtcagtttgctggtgttatagacttacaaatgaagattaagttctaatgtttggagagaaggaaaaatgataccttcacagaagctgcagttatgctccagagtttacattgcaagcattggctctagcctgaatatcactagtactaatgtcaaaggattcctggcacatttcagagcctgcttaactgtgactctcacacccatctcccccagcccctcttttttttttttttttttgtagtgtagaatcacaggccttaattttggatgagataagttttttctgatggatccaagcattgcttaaaattatatacatgctttaaaagcatacagaaaaaaacaactttggctcaattaagttttatcatcactgttacaaggaaagcctcattgtatgtgcattcctggattcttttctgctttaatttcagctgaatattgccataagctggaagattccaggcatttgagaatagattcaaatttgagaatggaccttgtgactatttcaagggagatccttcagttattattattattatttttaaaaggaacctttgagtcttgtaataatagctcacatttattagacatttgctgtctgtcaggctgagcaataagaacttcgtattaactcattaactccatctcatatactttcataatagctattattattcttatgctacagatgaggaaacagatgcacaaggagattaagttatctttccacagtcatacagctactaagtaggagtcagggcattaagcccagatagtctggggtagatagatcctgtatatttgacaaccacactgttctgccaatttgcattttctactcttcaagacgtcagaaaaataatctttccaaagatgagttgaaaaaagtaaaatgcaattgccaatagctaatagcataaattaatatgtttttaaatattaacatagagttatcccatagggtcctaaataaattgggattctcagtgtaaatgagatttcaaagaactttttggattcaatttctgacgtggttaatcatgtagacttccagaactcaaatggcctaagaatatatttctacattttgcaactgagaaaacctgtggagggaagtggcatggccaaggacactactgtgactgagtgtagaccagagccctccacctctggtccctattgcttttctcttttcttattcgctctgtagatggatttgaattttaataaatcaaggaataatgcatcttgctttgatacagacaaaataaaattaagacaaccttaatgtgaggatgatagtttctacatttatcttaagaggctacagtagacctgccatgtccagctaaatagaatttggagatgcagaaatgatgatatgttaggcagaggagaataatctatggtcatgtacttcagtggcccaatgtgaaagtaattcattattcccaaactattgcccttgctttaaagggaggaaggacctaggctgtctcttctgtgtatgtcacactgtggaccgtagctgtcattgagagataaagtaatgtgttttacttgtcagtcaatctgggtagtgagggctattttcactttgtgcaaatgttacaaacaacatgcttagttgatttttaagatagttggactgagttgcttcttataagcattcaccactgtgttttccatttctgaaacacatttccttgaaatcctgctaaaattatagtaacaatgtggtgggaggtagaataatggcctgccaaagatgtccacacctttgtctctggaatctgtgaataagttaccttacatggtaaaagggactttacagttgcgattaaggaaatagattttgagatgagattatcctaatgatcgaggtgggcccaatcttccatttccaaaaaaaaaaaaagtgggagagaaaagcagaaggattaatcagagatgaaggatttcatcagagatgaaagaagaaagaggagatactccaagtattagagagactcaacttgtcgttgttggctttagtaatggaagaagggggccatgaccaaggaatgcaggcagcctctagaagctgggaattactctcagctgagagtcagtaaagaaatggagatctcagttttataatcacaaggaaatgaacttcgccaaccacttgaatgaataaggacttggaatctctcctagagcttccagaagaaacacaacactgccaacaccttgcttttaacctgctgagaccaaatgtcagattgacctacacaactgaaggataaatttgtgttgtcttaagccattaaatttatggttatttgttatagcagaatagaaagctaatacaaatccttatttgaagaacatatttcaacatcttcagtaattttcagaaccagaagagaacttattcagaccagtctgccctcttaaccaaggtttcattttttttttctttttacccactgtcctcatttcattcctctgcccaacatatattttacaaataggtatcctttcattatccactggtgatttcaatgttacagatagtgccacacattgagcttaatgtcagtgtttgtatagaaattgatcaggccaggtgcggtggctcacaactgtaatcccagcattttgggaggctgaggtgggcagattacctgagggcaagagttcgagaccagcttggataacatggtaaaacgctgtttttactaaaaagtaccaaatttagctgggcgtggtggcacgtgcctgtaatcccagctactggggaggctgagacaggagaatcgcttgaacctgggaggcagaggttgcagccgagatcacaacattgcactccagcttgggcaacaaaaaatcaattcaagatggattaaagatttaaatgttagacctaaaaccataaaaaccctagaagaaaatctaggcattaccattcaggacacaggcatgggcaaggacttcatgtccaaaacaccaaaagcaatggcaacaaaagacaaaattgacaaatgggatctaattaaactaaagagcttctgcacagcaaaagaaactaccatcagagtgaacaggcaacctacaaaatgggagaaaattttcacaacctactcatctgacaaagggctaatatccagaatctacaatgaactcaaacaaatttacaagaaaaaaacaaacaaccccatcaaaaagtgggcaaaggacatgaacagacacttctcaaaagaagacatttatgcagccaaaaaacacatgaaaaaatgctcatcatcactggccatcagagaaatgcaaatcaaaaccacaatgagataccatctcacaccagttagaatggcaatcattaaaaagacaggaaacagcaggtgctggagaggatgtggagaaataggaacacttttacactgttggtgggactgtaaactagttcaaccattgtggaagtcagtgtggcaattcctcagggatctagaactagaaataccatttgacccagccatcccattactgggtatatacccaaaggattataaatcatgctgctataaagacacatgcacacgtatgtttattgcggcattattcacaatagctaagacttggaaccaacccaaatgtccaacaatgatagactggattaagaaaatgtggcacatatacaccatggaatactatgcagccataaaaaatgatgagttcatgtcctttgtagggacatggatgaaattggaaatcatcattctcagtaaactatcgcaagaacaaaaaaccaaacaccgcatattctcactcataggtgggaattgaacaatgagatcacatggacacaggaaggggaatttcacactctggggactgtggtggggtggggggaggggggagggatagcattgggagatatacctaatgctagatgacgagttagtgggtgcagcgcaccagcatggcacatgtatacatatgtaactaacatgcatgttgtgcatatgtaccctaaaacttaaagtacaataaaaaaaaaaaaagagtgaaactctgtgtcaaaaaaaaaaaaagaaagaaggaaattgatcaaaataatcatagagctaccaaataaacaaaatgatcactaccaagtaatttcatagagacaggtacatactctgttgcctacaaagaattaaaaaaaaagagttcattattctccccctctctcatgatagagttcatctcattgtatcgagggggttaggattcatttattggttttagctatttagggcccattgagcaggtatggggttaatccaaccaaatccaccaggctgagaagaaagtgagttagtttctcaaaggaaattcatggtcttgtccccagaaggagggtaaatggatgctgagctgaaaacaccagatgttcaagaaagtatattccttgctattcaaaatatgcccacacacctacattttcatacataaaactcactcaaagggaaaaagttcaagtccaggatttctccttaactgatgtgtagctttcttggtcgctttgggacgttgctcctcctcattttttaatatatgcctaaattataaatttatctacatctaacttaaccaatatgctgtggtgtacagatggtataagactcctctttgaagaggtagatattggtgaatagtatacagtggttatatatccatggcagtcgtcatatcctgcatgtcagaaagcagaaattttcatctctgataaaggcagaaagtcttggttagtcaatctggtggcccaggtgttctctaatggattgttcttttttcattgccctctgtggccagatttaagaaggccattttctgtgtataggttgtaccgctttagcagcctatgtaacacagtgtgagctcagggacatgggagttttcttaaggatgaagcgagtggcccccaacctttttggcaccaaggaccagtttcatggaagacaatttttccatagataggggcagggatggtttctggatgaaactcttccacctcagatcatcaggcattagattctcataaggagcatgcagcctcgatccctcgcattcatagttcacaatagggtttgtgctcctatgagaatctaatgcctcagtagtgatctgacagaaggtggagaccaagtgataacacttgtttaggctactcacctcctgctgtgtggcacagttcctaacaggccatggtaccatggtaccggttagtggcccagggtttggggacacctgggtcaatcaatcatataacagttagacaagcttatgttttgttttgtttccttttttcttaatacaattaccttaaaggttagtaggttatttgtctatttgcttctttcaaatcaaatcggttgctgagctatagtctttgagtctggaacctaatataggaattgtggtttacagcaactgacctcagacagttttcttgccacttttctagccctcacattaatagcttccatatttgactaagcttctggacaattcaaaatagtgggtcagggagaaagagtcccctgatatggtccttgtcacagattatatctcagctccttcatcacatggagattcaatatgcttcatgttccagcctcccccagtgtgcattcaggaaaccacttgcaaatttctgtcagtctgtccattttttccacttgaagaagttgacctttactctttgccaccaacggtagggggtggatataatggtggatgtagaaaaatcctgtacagagcttaaatgtccttgatttgaagtaaagtgctcatataattttgaaatactaattaaatatgttttcattagagcctttaagactttaagaggggaaagggagtatttgtattctgttagcagtaaaatgaaaaaaaaaaagttccatcttctcatttgtgtataatgtatgaatgcatttattgttttaaaattccaatctcaaaatttgtcttctacctgatggttttggagcactttacatttattatgactaattatgtaattgggattattgctaccatcttagtttgtgctttctattcaccaggcttctctttacctcttttttaccttccttttttaccttcttgaattaattaagtagttttcattccctttttatttttcaattgttttagaaaatacagatatgtgtatatataatgcatatgtatatatatgtgtataaaatgtctgatttttgtgttactcttaaatataaaatatgcttaagtctaaaagtaattaatatttgtattctccatttaatcaatacaataatattaaaatgctttgtcatttactttatatgttgattttgtccagtattttaattccttcctgattttatacactcagcattataaattattatgagttatgtcccgttggatgattactcagttcatgttgactcctcaacattttcattggtgaaatgttctttcatggcccttcactctggtctagaccacgtggacttgctttggccaatgggatattcataaaggttgtgtgagcgagcagagacttgatgtgtttgcacagtgaggcttgccttcatgggttcctacctttcttttcctttttcttttttttttaatttgagatgttgagatatagtttatctaccataaaattcatcctttcaaagtgtgcaactcagtggtttttagtgtattcaccaatttgtgcaatcattacacattaaattcatgactatctaatttcagaacattttcatcatctccaaaagaaaccccatgttcattagcagtcactcctcagtcctcccttccaccagcacctggaaaacactaactcattttccatctctatagatttctctattgtggacatttcatataaattatatcatagaatatgtatgaacttttcttctggcttcttttacttagcaggatgatttcaggtttcgtccatgttgcagcatgaaccagtacttcattcgttcataaggataaataatgtttcattgtatggatatatcacgttttgtttatccattcatagttgatgaatattttaattctactttttggctagaatgaataatgactaagcatttgtgtacacatatttgtgtggacacatgttttcaattctttggggtatgtacctagaggaagaattgctatatggtaaatctgtgcctaaagctttgaacaacttctaaacagttttccaaagtggctactccattttacattccctccagtaatatacgagggttataatttcttcaaatcctcaccaatactggttattttccatttttaaattataactatcctagagggtaagaagtaatatttcactgtggtattgatgtgcatttccccagtgaataatgctgcaattatatatgaattttaggatcagcttgtcaatttcagcagaagagtgagctgagattttggtagagattggactgaacctacagatcaatttggagagtgttgcaatcttagcaatataaagcttttcaatccataaacacagatatgttttcatttatttagctctttaattatttcaaggatgttttgtagttttcaatgtgcaagttttacacttaaagttattcctgagtattttattctttttaatgctatcgtaaatggaattgctttgttcatttcttttttggatttttttattgctaacatgtagaaataacattgtcttctggctactcttgttgtaatcttccttccactagtggccttctagaccttctaatcgtctttagtgtgctgaaattttactgcacatctattcattaacttttcaaattattcataagactctgagtttagaaaatctgaggattgttgtcttttatcagttgtactaaattctcagctattgttttttcaaacgttatattttctctatactctcttttctttttctagtaatcctaccaggtatattgtgaaccttccctctcccctggtaacctccctttcatattttttgttctttaatttctttgtttcataatggataattttcttctacgtctttttcagctctcttgcattgtgtccaatctgccctttaacccattagttatccttcaatttagatgacaaaaaatttttaaaattactgaagtgttatgtgtttctttctcaaatatatctgttcttttttcacagattacttgcttactctaattctttcttcgtattggtactcattttaaatacaatttaaatgagtactaatgcctgcatgtgatctcttactcgtggttgtttatttttcatgtcttttataattttggatgtgagagtttccttagactggctttccctgtgaaaatcctggctggcttaaaagcatgtttctctaaggtggtttggaattttctcctgcctagaactttcaggtattacaaattgggatcaattttaatattctcttctctgtttagaagtccgttctctatgcagatggtataaatttgacaccaaatccatatgtaacataattgataattatgaatttttaagggaggcttgtctccccaagcaaaggccaagcaaaagcagacaaagtatctttgatatatttgactaatcccactgtcaaggttctcagcttaatgcatgtttcagttccatatccctatttcccactggcctgaggtttcaactcctgtgataatgaatacaacaatacaaaatacagatcatagaggctgacagtatctcctagggaagttgtacctgctgctcacatatttacatttgtagttttcagtgttctttttatgtcttgtccccaataatttcccttctcagaattttacctatgagttttaagagtgttcaacatattgtagacttcctaagtgttttagtgcggacatttcctgattatccagtctattattttggcagaagtagaagtctgaaacatgtgtgttgagggctgaattttggctgcaggaatagtgtgggatctggctagctgtctacaaatgtattccggtttttctcacatgaaaagaaagtttattggttttccatccttaagggcaaataactcaagctgaaaaacctgccatagatataggctataaaatgacaatgtcttacataaaccctgatttttgttcttttctcaatatatatcttaaaactatatgataaactgtttgaaaataattgctgaatgatttgtttggtcccttaagaaaagtgaataaaagttaatacagctgtgttttctgttagcatgaaggctgaagttcttgttttctttgaccactaccagtatttaggaatccagtgtttcccaagagagcgtctgttctcatttatattcttcctctccacttttcaacaagctggtggcaattctggtttgtagcatcacaaggagaagtctgttgagattgctgcccctcacagcttcaacagtttgatttctgtcttttcactatagcactagaactttatcctttcaaattgtagcattttagataatcctatgtttataaatttttatgatgtctgaagaataagaattatattgaatctagaataataatgaagaaaataaaaataccacctccaaaacagtaaagcgggatcttccactcaagatgtacaaatgaattatataggtctcttgcttcatatttcaaacacatataaatgcttggtgaaagtggtgagattacaataaccattaccataatataaatatagcaccaaagtaaatgttttaaaaggtattttacaactattgcactagaatggaaaaagtaatccctgaggtatgtgaaatggcatggttcatggggcaattacatgggatatatgccttagggttagtgaataaacaccttcacagaacctggcttcaaagcctcagacctctctcatagttgaaataggaactatggtctcttgttaattctgggagataggaagggaggtctttttagataaatttttcacctccagtgtgcttcagagaagtaagtcatctccccaaaggcatggattcagaaagtcaatgtgggaaatggaataaaaaatattgagacttatttgtctatgaagcttgaattcatacactatccttatatgcaaaagcccttagctagacactagtgtaaaattggtatgaaactgcgtcctattaggcccttacgaggctgatcataaaactacccctaggagaccctccacaacatagaaacagttgcaacttcctcagaattattttcttaggaccactaaagatcatcctacagacaaaaattacaaagcacacaaggaaatacaatgacatgaaaaataggcaactgaacaaattacagaaatcatggacaatgagtttcagaaaatagagcactctgatatggatgttaaattaactacacttaaatgtccagagagataaaatagatggtatagaaattttgagaaataatagaaaactatgaaaacaggcatatttttaaaaagaactaaataaaaataataaacaataaaatttataaacaaagaaatacacaaaccaacacctcaggaaacagaccaaagaatagactaaacacagctgaagagagaattagcgtattgaaagaggaagattgatgagtaaatctctcagacagtagagagacgaaggatgagaatttgatacttatgaaggaaataataaaaacacctcaacataattttaataacatttcaagaaactgaccctagtttaaatccttggaaaggggcagaaccagaattaaaatttctgttctctttaaagtctacacttttatgccccatgtgatatctttcttgggtgctgaacaagtgcgttaaatttggaaagacagattctcacaggtcttgtcattgtttcgtggggcaaaatgttttggagatggctctcaaagaataacaatgatgatgacaattcacacatacgcatctttaaaatttataaaatttgtcttattttatgctcaaaaggacctggaaaatcactttaaaatctatttatctttatatttttcccatataaaacagagagtgtaaggaaaaaaaactctcaaaagtaacccaagttaatggtacatttttacacctttattgagtgctatttacatggtattaatggtatttaatggtcataatcctcattttacaaatattccaaggctgataaccaaatgttatttgattcccaaagttacactctctgaagcatttaatctggcttgaataaagatcctctgattccaaattctaggctgtttattatacaacatatgcaattccacacaaccttaactttgctgccaattcatgacacttctgaaacggaagttgtgattttaaaataactttctggaagccttgtcctaattggtagctcttccaacagatgctgatggtgggatgataaatgaggcaatgagtaagtctcaacacctccatgtgctggttactctcctgcctcccactcaactcaagttaccccaggagcctcagtaattgatcatctcttcataatctgacactgtgggaaccggagtccataattaaataccgcttgcagtatgtacctgcatcattagaccacacttgaattactagttaaaataataactgtattagcaaagaaatattcatcagtgcatgcacctggccttgggaattcacaactggcaacaactataagtctcctgttatatgaaaaaggcaatggctagatggtaaaagatgagtgcaagtactgcttattgacacttttaaattctggaacctttgattggtaaataaatcactaaggttctgtttcctcttttataatagagacatcataatttttgcctgaaataattgttgtgacggtcaaatatgttaagggacataagctttgtaaactgtatggtgctatcttatgctgtctaatgtagttttctgtgacgtgtgcattagttttgttttgccagcaagactgtaagactttgagattatattttaaatatgcttttgttttcacctccaagaatactgagttaggctagggtctcactaagtacttgctaaaatgataaaattaaatatttgtgttctcttattatttcattacatatgtgtttactgtctatcttttccataagaatataaattttatgagggagacatttgtcttttttgttctttgataaattacaagcttctagagcattgcctgatacatatagatggtcactaaatatttaataatgaataaatgaataatgtttcctaaatgagtagcttttggggtgggaaatttaatattattcttcatattttcagtgccaaaatatttttctggcctgttaggcatttaccaattgttgctggatgcattttaaaaccctcacacattataaatattttgctgctttcctgttcgctctcactacctgcacaacctttgttcaggtacaaattacatcacattcaaacagttcttatagtttcttatgtcctgttttcattcattcttctgtaattcatattgtactgtaataccctaaaagtctacctaaaacacagatttcaatttgttgttacccagcctgaaaatctttaatggcttcatataactaaaacacaaattctgacattgaagactctctacaataaatacagcatttgaattttggttcctttcccttatgactccttcctgtacctgatacccctatgttggctagcctgcacactttttcatgaatcttcaattttctcacttttgctcccataattatattagttactacatgaaatgtccttcctccatcttgaacatgtgtattacacccagtgaccttttatgtttgaatgttctgtctaaatcatatgacacttatcccagagacccttttggttgagcttaatttttttaacaagataatggacgatggcaaagatatcttgtaatttatttatgtatgtttttacttatgtatttataatcatgtactttcaaaaaggagttgaatttcatcctgagtcttatagaaagccattgaagtgattttagcagaagagtggcacgatctaactaaagttttaaagcagggtttctcaacttcagtactattgacattttggatcatataattctttgttgtgaagggatttctgtgcactgtaggatgttcagcagcatccatggcttctgcatctcagatgccagcaccaccacaatcccccattatgacaatccaaaatgttccctggcattgccaaatgtctttttaaaggcaaaatcacccccagtcaagaataattgtttttaaggataaccctggctatgtggagaagagtatataagggaacaatggagagaagcaatagtgcaaacatacccacttatatggtttggctctgtgtctctacccaaatctcacctcgaattataatccccataattcccatgtgtcaagggtgggaccaggtggaggtaagtggatcatgggaatggtttcccccatgctgttctcgtgatagtgagagagctctcatgagatctgatagttttataagtgtctggcattcccctgcttgcactcactccattctgctgccttgtgaagaaggtgcctgtttctcctttgccttctgctatgattgtaagtttcctgaggcctcctcagcaatgtggaacttgaggcaattaaacctctttcctttagaaattacccagtcttgggtattggctatttcttcatagcagtgtgagaatgaactaatacacccatcagctctattttctctaaacctgtatgtgaggcaggaaggagagagaagagatgttcactagccttatggctgaagctttactgtaaactgagcagatataaataattcaacaatgattaactgttctctgataaacaagaaaaatatagcaggtccagacaatataattgaaaactctctgctattatgttagatctaattatatacagatatattattatttgaaaacagagaatatatattttcacaagtacttcttttctagtttgagaattcatatttgtctctctctgggatccagctggggcttgacaagcaggtttaaaagtttaattcagagtaaagtaacaataatgtacatccaaacatgtttaaaaaccaccactaccactgcaatattcagaatttaaaagagtttattcttgtttttgaaagataaaggtgctcccatcttcttgaaatcaagtgcgaataacaaattctaactaacagatgataggaacatcagctctcacttcctgcagcctctgactgggccagctatctctctttaattccagcctgcagcccaggatgtctggactccaaaaccaatcctggctccaggcaggggcgctagaaggagctccatatcatttactttttggctcagctttgagtgtgtattgcttccagttctaactcaactttggaattagcttcccaatgatctggcttctaatttgctttttcatctcctctaatgcctggatttaatgagttgtaaaccaattctcctcatcttgttgaagttgttgccactctttttctgatggtggcttttgaactaaggtatactttttataccttgtcctttcttttgcaataacaaaagagtctttgagttattcactagaaaaccattggatacttgaacatttattacataagaacactgaaaattttcaattactggagttttggatctgtgcagacagcttctatctaatatataataatgataaagtattaacatcagtaataacaggaatcagcagcagaaacaaaactgtagtagtacattgttttctctattaatacttttctgcctagtcttattccttctgtgactagaggtgttcagtaaggaaaaaaaaatggtgaaatagagactgcatgtatgacaatacattgaagtgatgctatgagaataagtcgacacagtgtagagaagagtttgtttgtgttgaataagcttgcctctttagaaggacttacagtcatgacccagggtgttaagtctgaaaaaagatctgtttctctttccccaagatggagctctgaccattgcaagagactagaggagtagaaaaagaggaaaggatagaaaggaggaggaaagagacaagaaactctgttctgtgaactgatagattatttgatgagaaaggtaaagaaagctttgttccacctctggcctctgggagctcatgattgcctattagcggtttttgtatttatggtaatggattgaatttaccctaactcctactgactaagaaggagtcaccacaaccatcgcaaaaactaacattttccttgcctaattattctgactagaacttctagtactgtgttaaatagaaatgacaagaatgggcatccttgtcttcttgttcctgatctcagaggaaaatattttaatttttcaaataagtatggtattagctgtgggcttatcatttattatattgaggtacatttcttctatagctagtttattaagcatatttatcttgaaagtgttgaattttgtctagctttattgacatccattgagctgataatgtgattttcatactttattatgttaatgtagtgtattgaagcagcatagttgtctggagtagtatctgaggtttgttgcctcatgccagggaaatcaaggacacaggcacacacaagcagcgactttaagaacagaggtttaataggcaaaagaaagagaaaggagactatctctctcccttgagagagacaggggtccccgagtgggacttctggcctatgccgagtgcacagggttttatagacaggcttgaggaggcagtgtctgatttatataaggcccaaagattgattggagcaggtgtgatatttacatagctggtgaggaagctggccgccccaccctaatcttattatgcaagtggggtctctacttggcctacagccatgttgcttgcttcttactgtgcacatggttgacaaggaaagggaaagatggagccgccattttgaacatgcctagtccccagggaacccctttcccattggcacagctgctggcattcacctgttcaagattccagcttgcttgtctacgtctgcagctcaattttacagacggctctttgatagaaaacaaaatgatttgggggctgcttttcattaaaagggaaaccttaccaaggaacttccttaccctcacaatctgcctaaataatttattcttaacttccatatcagcattagagattattcccaaagtattacaattactgatttgcatatggtaaactatttttgtacaccagggataaattccacttgatcattgtgtatgatcctttcggtgtcctgttgaaatcagtttgctaggattttgttgagaatttttgcatccagaatggaaacgaagaagtaaaattatcttagtttgcagatgatgtgatcgtataggttaaaaaaaaaaaaaaaaacctgaaagattttacagaaaaataactagaactaataaataaattcagtaaacttgtaggctacagcatcaacacatagcgcatttccatataccaacaatgaaccatccaaaaaggaaattaagaaaacaatcccatttacaatagcataaaaaagaataaaatactttgaaatatatttagccaaagaggtaaaagacttgtacactgaaaacaaacaaattaaaaaattaaaaaattaaaggagatataagacttaacattgtgaaaatgtccacactacccaaagctgtatacagattcagtgccatccttttcaaaatcccatggcatttttttacagaaaaagcaaaaacaatcctaaaattcatatggtatcacaaagacccaaaatagtcggatgattttgacaaagaataacaaagataaagtcatcatgcttcctgattgcaaaatatattacaaaactacagttaaaacaaagatagacatatagaccaatgaaacagaatagagagcctataaataaatctatgcatatatattcaactgatcttcgacaagggtgtcaaaaatacacaatgggctgggcgcagtggctcacgcctgtaatcccagcactttaggaggctgaggtgggcggatcatgaggtcaggagatcaagaccatcctgactaacatggtgaaaccctgtctgtactaaaaatacaaaaagttagctgggtgtggtggcaggcacctgtagaaccagctactcaggaggctgaggcaggagaatggcgtgaacccaggaggcagagcttgcagtgagcccagattgcgccactacactccatcctgggagacagcgagactctgtctcaaaaaaaaaagaaaaaaaaatacacaatggagaaaggagagtgtctttaataaatggtagtgggaaaactaagtatctacatgctttacaaaaaatcaactcaaaatggttttaaaacttaaatgtaagacctgaaactataaatgcgctagaagaatacatagacaaaacactttttgatattggtctcagaaatgatgttttgatgatatgatgacatccaaagcacaagcaacaaaagcaaaaatagacaagtggtactacatatgactaaaaaaaaactgcaaatcaacagaatgaaaaggcagcttacagaatgggagacaatatttaaaaaccatatacctgataaggggttaatgtccaaaatatgtaaggaactcctacaactcagtagctaataataacaataataacccagttaaaaaatcggcagaggaattgaacaaacatttctccaaagaggtcatacaaatagccaacaggtatgaaaaggtgctcaatatcactaatcatcagtgaaatgcaaatctaaactacaaggagatatcacccacacgtgttaggacagctattgttgacaaggaaaacaaaaagaaaagataacaagtggtggtaaagatgtagaaaaattggaacccttgtataatattagtggaaatgtaaaatggcatagccactatggctaaacagtatagaagtttctaaaataattaaacgtgaaactaccatatgatccagcaatcccatttctgggtatatatccaaaagaattaaaactgggatctcaaagagataactgcactcctatgctcattgcagcatcaattattcacaatagccaatgtatggaaataatgcaaatgaacacaggcagatgaatggataaagaaaatgtggtatacgcatatgatagaatattattctaccttaaataagaaggaaatcctgccatttgctacaatatggatgaacctggagcacattatgttaagtaaatagaccagttacagaaggacagacattgcatgattccacttatttgagttatctatacagttgttgcttaggggattggtttgaggaccccagaagatatcaaaatctgtggatgctcaactcctttctatgaaataccatagtgtttacatataacttgcatatatcctctgtatactttaaatcatctctagattatttataatacctaatacaatatagttgttatagtgtacttttaaatttatattatttagtattgtattgtttttgtgtttttttccaaatatatatgtgtatttcttccaaatacttttgatttattgttggttgaatccatagctgtggaacttgtggattgaatataatagtcaaactcatagaagcagagaatataagagtgtttccaggggatgggcggtgggggaaatggaaatttgttgtttaatgggtattcagcttcaattatgctaaatgaataagttctagagatctaattatacaacttagtgcttacagttaatatggtattacatatattaagatttgttaagagggtagatctcatgttaaatgtacttagcagaaaaagtaaaataaaataaaataaaataaaataaaataaaacaagaacaacaaaataaaaacaatgggacactttggaaggtgttgaatttgtcttttgctttgattgtgctgatggtaccacaggcgtttgcatatttccaaagtcatcaaactatacacaataaataggttaagttatttgtacatccattaaaacccagtgaggctgttaaacatggttagatgtgtggcagaatagtaagctaaattgtaatgtcagcatttcatcaagttgatgagattagaaaaacaattttggaaaagaaaaataagaaatccttaagatttactaaaggcttggacatgccaccaccttgctaaggggttgctaaaccaggcctttctctgtgcttttacaacatctgatttcttacaggcttcctcctcagtgaattggaaaaaccagtgccagctgtgagtacagaaataccttggaggcattgctgccaggggagttcatgagcagggaccaaaatagggcagactattttttcctaggagtctggctacccagagggctgcctgctctgcattgaagctgctttgttcatttctcagtgacaagagcctggcggctttcaagacaagatccctggaagcccagatctgaattagaaggcagcttcccctttctaggctctgactgaattgttgctctctgaggactgctcttgggcaagctctgagaggggaccactgggctgtgtgattacctggtctttgtcacaagtgcaaaatttcactctgtggcataccagagtaccgattagctctagggctaatgacaccttgaaaacctgggttgcagatgttttcagctggctctgggggagcttcctcttcctgaaatagcactgcacatagtcctcttcccaccctcccatcccccgccctttacccatcaccactaatcacccccttgaagtgttatgactgtacagtttctatttggtgagctgcatctgaagggaaataaatcctcaaagtgaaggcaacttgtcagtgcaatatgaaaacaaagtgtggagaaggaacacttcagcaaaagccaagctcactaacctttcaaaagtaaccgtatttaatttgagctgaatcaggaagaccatttggatgtcttgtgtatttataagcatatgtgcaggcttcattttaccccaaaggctgcttgtaattttgtccccctgcacatatgtcttctcaagctgtaaactgaattttcagtcctcattactgtgtgtagattgagctctggtcactgagttggcaaagtactcaaatagtaacttaatccaccttagggctatttcttggatatcacttccttcctcagtttttctgcctgttcctcaaccctcaccttctcacccaaaaggagactggtagataaatttcagagatgggatttttaatataacgtcttaactggtcttcctgtctccagttgctgtctctattgctgaaaagcaatatatactcttctccacatagttgtcaaagtgatctttcaaaaatatatgcccacaaatctgctctcccacttgaaacttctatggctccatattgcctatagaaacaagtccaaactacttctactggaattcatggttgtcctctacttctacacacagtcatgctgtttcatagtttccataagtctaattggaatgcttcttccccttaatctcatggctggagaagtcctatgtgcaagatgtcattggattttcacaataacttgattttctagatagcagaggaagtatcatccttgtttacagatgaggaaactgaaggttccagagaccaagcaactggcccaagtttacacagtaagtggcagcaccaggacttgaacttacatttttctaactacaagtctgggtacatttttatgtgtctattatgaattcaaagctgcttatttataatttgtaatgaaaattccataactaaagaataggaactttttctggtagtattctcctcagaatatattccctcatggctaaaaactggaggggactatatctgtccttccctcaaactccactgctatcctaagaagtgccattcatgaggaggagcttgagtagacactgttggtgtctggtcactgtttcctaaactttctcactgttaacatctttgcctctctgcctagagccttctttggctatgggaacatgctttagtgcacacgcagggcaggctggaagtgtcagagagtttacaagcccagggcagctctcatcaatgactaacagttattggcagataaatattccagactcctgtccctccactggaagagggtcaattctgaggtccgtttggcactatctcttggagttctccaaggaaacgggaccttaattgcccacaacaggaatctacttattagtgttccctgcattaactttcttctgttctctgtctcagttccttacttccctgccatacttgctcccctcccaaataaactacttgcactaaaatttgaatctctggtcttgcttccaggggcaactaatttaagatgtttcttcttaaagtctgagctttgatcacaggccgatagagaatgttagagttctcttcagttatcaaatcagcttgaaatatgaaagtaactaatctgcacaaactgatttcccatagactgagcacagaagaagatgagcatctaatcgagacaggccattggtcaaaaacgactggagcagttgtaagtaactgctagatgtatgctaattccagtttgatatttatgtttgtatttgtcatcaaatactgcaattgcacatattactttcccactgttctcagaggaagaagtatgcttctttctattatggctaattcttcctccacccatgctatcatttcatcctgtttcaccttctcagggaccctgctacatcacttctaccctctcttttgttcttgtagttacctcttttcaccctttacccatagctgaaatttttattgttctttttctattttcagtaaagctttttaaaaaggatagactcctcttactgccttctacttcctcacctcccactcaattctctgcctactgcaatttggcttctacactccccatttgatggaaatgccattttttttgagggttagattggtttgtggcaaaatccaattgtaaattttcagcccttatattacttaacatcgtcatgataattatgtaacctcttcagattcacttgtggcaaaatccaattgtaaattttcagcccttgtattacttaacctctttatgatcattgacagtacagagatgaaaagcaatattgcatgtaagtgctcaatagtgtcatctattattactaagattattattgcccactcactaacttcttgagacctatttggaagctttctggaaagaacttctctctgtttgcttgcttttctcctccccttctggtttctcttacttcattccattcattggatcccatgcttttgctcactctttaaatgtctatgttcctacagagctctatttccttcttctctgactctacacatgctcccagtgagattttatttacctccataacttcagaaattgatgtctccagtccagaaatatttgttgaattacatctttcatttctgattcattctgatctttcatgttctgatagaacatccctatctggaggttctaaaaggctattggactcaacatatgcaatgtggaatttattttcctttttatgcctctctacccctctatacttcttctctagtattttctattataaatggcaccaccacctccttagtagcccaagccagaaacctgcgtataatcctatattttccttctcacataccaaccaccccttcaactgtgtccagttgtctactatagcccatagattataatatctgaatatgtctccaatctgtttcctcctatgcaacccacagacattactggagtttgtggtctcattatatcttgctgggaagcttgccccagcatcctactcgccccctgtctccagtcttgtctacttccagtttattgcctgatgccaaagatgtattcaaaaatataattctatatataacatgaccatgtttgaaatatttttattgatcttaatcacccacctaaatagaaaaaccctagtacctataagaatcttgatgatctagacatgtttggctttgaagccctataaatcaccccactccaaatatatcacagccatacagaactgcttagtggcatgccctgtttttgtttccatggcttcctccttcatgcattcctcatccccactcccccaaaggaagaattaagattcctgtactgagataaacatccaaccattatccccactctatattataattagaataacttgtttatatgtttgtcttttttagtagcctgtgaaatccttagaattgaattatttcctactattcctctttaaaacttcagggtttatcaaagtgctttagttcattccaggctatgagttcagaaatttctatccaattcctgtctgttatcttttaaagactgattcacagaagtacttcggggattatgaagaacataataaataggcaaagtcaagagtttggtttccaatatgagaaaattatgatcagctgggaactggagtcagaggctaagagtccaagtcctcaattgtgccatgttctctttctgtgagtttgagcaagttactttaaaccctctgtgcttaacttggctcatctttaaagctatgtttgtaattcctgctttaccatcctattgtacagattaaatgagataatatatggcaaaacccaactttgtaaattgggaaatgctaaacaaatgccagattttatgatcaccacacagaagtagcttattagattttgaaaacacaactgctctatcatttggaaggatttcaatggcaagaaacaaaaaccagaaaaacagcggcttaaacaaatagaggcatttttttttcattcactagaaatatggaggcaagttgttggttcagctggctcattgtgctaccagggcctcaggatctgcttctaattttactccattatcttttgcttcttggcttttgtctttatacttgttgcctcaaaggtggctgcaatagttacagacattacatctgcatccaaagtagaaagaaaggagacaagggaagaaatgccagtttacttgttctttttatgaggaaagcacatgtgtttccagaagtccccatcagacttctgctcctctctcattgcctgaaactcacatggccattgtgagctgtatgggagactggacaagcatttagccttctcagcctatagatgaatgtaggcaaggaaaaaggggctggctggaggatggctgttggctttgccagctaacagtgtttgccacacatatcttcctgaaatatctcagtattcaatcaattgatgaacaataaagtgtagcattgtgttctcaaatctgctttcagtgggcctgggttaatcattaagactgactgagagtcagcatgtcttttcaggtgtctggtcttcccatcagatatcaatatatttttaaataaagatcatggaattctgtatttaatggaagaaaaattcacccaagctttatgcttggacctcagaaaaatgcacccattagaaattggagagtaaattaagagaagagacttccttgagaattggctttccagcacaattttcagtaccatacagtgtagaaaggcaaacaagaaaggattgaagataggtgaagatttacaaacaggaaagaggtgctggaagaaagcaaaaaacgaaatgaacaaacaaaattaaaataatttcattccactttctactcaagtcctaacatagcatttaatttataatgagcaacacaatttccctccctagttccacctgctagctggaataactgtagggaaacccaggaattctttaggattgctagcgagttcactggggttattttcattttctagttctggtatgattacaagtagcttttttcttttcattagttatgtcacatagaaatagagggcacctcaaacaatatgttgattgaaagcacacaaagccatgactctgtctaaggatcagtttggtcaaggagtgtaccttgtgctgtgtctgttctgctggactacatggcactctagagtagaacagctctgcagccccagcagatggccactttctgtttttagaagagccgacttgggatgccttatgcttttaatcttgttgaaaggcgttctaaaaactcagagcctatcagttgctcttcatcttttccattcaagtgagagcaaaaatgcattaaaattaatttattatttaaaaccataggaatggaatgtataatgtccttcacagaaatgtagaaattaattctagcaataaacctgagaccagactgcaaaatcacgatgaactattctaaccatctgcatttaacattatgtgaaaaattacctagtcaaagcagtctattatgtgcttccttctaggtcttcccatcccttccctttctttctttcctttttttttttcctttctctctttcacatagtccttagcttaggccacaaaggcagtcagataggtgattttgttacagctgtgtacctgaagaattccacagacttttattttaaggtctgaaaacacttttatttgcagtactaacattgcaagtgtcaactcttttgtgaaggacatgattacatctagtctctttttttttttttcacatacatcatctaatgatattttcacggttaaaactaagacactggttccttaaattgaattatgttgaaaatgcatttctagttgaagacaagaatttgatttatttgctatctgtatctatacattttcattggttaacaaggcttcaaatagctttgagttgtcggcttcaaatagctttgagttgtcaacttcaaatatcataattgccatgctcataagttgcacacaagtgaaggaagttgactaacttgttgagatatgcagacagctggataatttttttaaagtaaatttaaaattatcttttttttatgattcctttgcaaaaggtagtgtttaaagtatataaagagaatgacttctaaaggattggagagacccttaagtttggagagctagaagatactctcagagtttaatttttcaagtttagtccttcccccactgctagtctttactcccccacgtttttttttaagaacatttttctagataagtgaaagacttcccaaggtcacatgactcactggcatgagatctcacatctcatttctgatcagtgtttattctgctaaaactgcttttcaatatgaaaagcatttttaaaggattgaacgtacattgaaatcagactcaggttgaaggaaagagcttatgtttaactggttatattaaaaacttcacacagaaaacttacattaaaatgaatttaaatatttctcagggaaatgtagtgcaagatacacacacttgggagtcagatgtatctgggtttatatctcagccctgtgttataaccttgagaaagttatctacctcttctgagcataaggatacctattttgcactgttttgaaaatcagtactgtatttgaaatacctagtgtagtacctggaatatagtaggtactcaaaaaatcatggcttttatcaggtaacataaaacccaacttttatataagtgatggtgaggcttacataatctcagaaatactgggaaaaaaatgtgtactgtgctggtgtcagtgtaaagaaaataggctgataaaaatgagtctaggtaggtaaatactagatgctcacaatgttagttcctgcttcccttgacatgagtcagctcagatgttgaaggcatttcaactaaaggtatatataccttgcctaggttcttagtcagacctgagcaaggtagggggcagagtatcagaaccagccactccagctgatggggcctggaactattctttgtatagtacagtacactagccaacttgcttgggaactccacctgtatggttttggcacttgggttagtttgttcccatgctgctaatacagacatacccaagaccgggtaaattataaaggaaagaggtttaatggaatcacagttccacatggctggggaagccccataattatggcggcagtcaaaggaagagcaaagggatgtcttacatggcaacaggcaaaacagtgtgtgcaggggaacgcctctttataaaaccatcagatctcatgagatttactcactatcatgagaacagcatgggaaagacctggccctcattattcaattacctcccactgggcccatcccatgacatatggggattattataattcaaggtgagatttgggcggggacacaacaaaaccatatcaccactttaaaaaacaaaaacaaaaacaaaacaaaacaaaacaaaaatcattggtttgtggagctttggttctgaactgctacgttggtgtcttgattcagatactgattcctctagtgaagcctgggacactttgctgagacactgacatctcaccaagtccttaacacccatctgttttagagatagacactgttaacttatagcctttgatgctgactgcgctcctgttccatgtagatgtttcatttgtaaccaaaatgcttccactgcctggacttggtatttcatgcagcaggagagcacaggattagaataagctcaacctcaccacatccttctgaatatcgtgattgtactgtgggttactgccatcaagtacttatcttctatttagttaattcatccacctagattttattccaacccagtttgttttctgtctctcactgatgagcttccatagttgcttgtaccaagttgtcttgagctaagaattttctggaagatctgcaggtaaaagaaaagattaatgtagatatcatggttgaagctaatccgtgcagggcattaatattgtcatataacctgcatttcttttgagctacaactctttgaaactctgtgtaaagccacagctaagttctcagagacttattgtggagtttcagtgctacaactctctccttcctaggagatttgatggagcatggagtcatgtaaataatgcagagtgattgctggaaatctgcccttctgtctgatgttgacccatgtttcttgtacaaagttgaggaacccttaactttcttccctgttactcattccactatacaaagagctttgcagataggcttgcaaatgtcttaagtggcagtagataaactaattagaagctcctttaaggaaacttaacataataaaaaataaaggctgggagtggtggctcacgcctgtaatcccagcactttgggaggccgaggcaggcagatcacctgaggtcaggagttcgagataaggctggccaacatggtgaaaccccatctctactaaaaacacaaaacttagctgggagtggtggcatgcacctgtagtcccagctactagggaggctgaggtgggaggatagcttgaaccagggaagcagaggttgcagtgaacagagatcgtgtcactacactccagcctgggcaacagagcaagaccctgtctcaaaaaaaaaatcagttataattttggtgtttatttatgcaaatgataacaaaaccctaaagaggtcttgggtgcaatgtttggtcactgaggggctcttgtgtgagaatgagtgggacagaagggcttaggttgctgtgtgccagtgccctatttaataagttctcttttagaggcaacagcaattgctcttgcctctgtggaaggtaaaagcagaaactctgatggaggtccctgaatgacaatcatggactgtaaatattaacttccacggatctatagttgcaatttttcctcaacaagggctcctgactttgacttatttcagattattctctattattttgaaatcagaaaatgaacttggtagttcaacatgtttttacaattaggtatatacaaagattatattatagacccaacatggataaaatgcatgctttttattgtttttctaggagtagggatggatttctgcccagaaactcttactattgccctgagttcccattatgactaatgacatggattgacaggagccaggagtatcatctgcaatcatgaaccagaagaaattatatgggttaaagaaccagaagtgcacgaatgggacatagattactgcagagccacttgtatttgttaagattcttttggtcacatgcagcaaaaataaccctgagaagcacaggcacactaaagaatattttatcgtagacacaatgtggtatcttacagaaatgagggaagaaatgagtaacagcctcacgagggaaaggaattaggacagcatagacacctcctcgggaggagttttgggccttttgggggatgagtaacaacacatcagctttaattgttcccagtttccaaatgttattattccaaatttcaaaatcccatggggtctttcagggtccggcatctatccttggattaaactgtcctggtcagtgggatagggtcacacagaaagggcaaggcttccagagcataatcctgtcacctatgagtccatctcagagaaggagtatttgttttgagctaggcagccactaccaaattgtctgctatacacctcatattccattatgaattctcacagttaaaaaattcccaagtacaggctgcatgaaaaataaaaatgaactacacacacacacacacacacacacacacacacacaccttgagtatgaaaaaggaaataaagcaatttgatgcttatagcaaagatgctgaattctttctttttttttctgacaagaaagtttatttttcagctcataaaatattggttacatgttggattgggtctctctaaaatttatatgctaaagtcttaacctcctgtacctcaggatgcgaccttattaccttatttggagacaggttctgtacagaggtaatcaatttaaaataagcaatttggattggccctgacacaatatgactggtgtccttattagaaggggaaatttggagatagacatacatagcatacagaggtatgctatgggaacatgaaggcagagatctagtgatgcatttataagccaggagcagtcaagaatgtcagcaaaccactagatagtaaatgagaggcatgtaacagagtctttttcacagtccttagaaggaaccaaccttctagacaccttgatctcagatttctagcaactagaactgtaaggctacaaattgttttttaaaacacccactttgtgatactttgttatatcagccttagaaaactagtacaatgttatgatcaaaatgcaaaagggtattggttatacattttaaaatgacttaatgagaatttaagttttcagagaaaaagatactctcataaaaatatttttatattaaattgttgggttactttttcactgacactaactttcaccttcattcctgtagtatgacatgtgactaattaaattcttgaatgtatcacagaccaaagaaaattggttaagtaagctgtgaagtaaatgggctaacaggcacatatagagatgtggcctaatattcttatgtttttagggaaatcttctgatgttaagaaatcctttctcaattttgtaataattaggacttaagctaagcagtcagtggaaattataaaggaatagatttcgttgcatttttaggtcaacagtggacttttttcttggcgattactaacattagctcagccatctgtcctttttaccagtgaacccgtacatttcaaagattccagctgagaaaagctggactatttcttttctcttgcaaaatataatgattcccagtaatttataaatgtttgcaatagcaaaaaatttgcagatactacaatgggttgtgttgaggccactaaccctcaaattcactggcaaataccatagttcaaaaaaaacgtagttctgctacttaaaaaaaaataactcccacacatatttggtgagaaggataatgatgaactaaatctgaaatctttgtaactcagtaccagtgagttcctgaggctattcagcatgttattgtacaaagatcagtaattatctgtatttatctcttttatatatttaatgtttatctccccagtagattataaactccatgaggaccagaactacatttgtcttggtcaacattatgtcccataaatctagcatagtacgggaattttaattcatatttgttgaataaaaggatgattaagtataaaaaatcagtgattaatacaaggtctgggcaaagtattaccagtttgatacagaatttagacaacttagtacttccagagatctgtttctttctttaatgatatttaacctacatttttttttgtgtttcccaacctggatatgtcatatcttttcttttaaatctttagtagctcttcaagtcctgtaatacaaagttcaaaatcgatagcagaacaattctctttacaatctaaacttactcaacatgcccagccttatttctttccatttccccggtctttactttctcttacctttctctcccaatatgttctttatgatctagccacacagctattctcaagcccatatgttccacgtactttcagagctacttggtggtgttcttgcctagaatagctgtctctttccccactctctgttgaaattctattaatcttgcaagacctacctcactgacttagtgaaaacttccataaattcacctttttgtgtgtgcaaaatcaaccacttcctcttcagttccctctgaaaaaaaatccatagcaaataaattgttttgccctgattttctgtatatttctactgtttgattgagaatcacttcaggaaatgcatttatccctccatccaaagaacatagctcagtgtgtagaacatagtaggtaaataatgtcaaacaatccttaattatttttttctctcagaattcttagttttaaattcactctttcaaaaaaatatgttgatatctggttccactcttacgtatgtacttaacccatccaccagaagtggcttgctcatttggccggagcagacctaatgttttacagaagagtgcacgactcagactattgaatcttcaaatccacttttcagctagttttaaaataaagatatgtaccccaagtggctcaaaacagcttggtatagatggcacatctcaatgctgtgggactattcaaattttacatttatttctttctatttttataaaataatcaagtgagtgaaataatacagcttcttgttcctattatacccttcgtctaattgacttagattctccagagtcaattaaaactgaatatgttatcccacccagtcatgggaaatgaatgcagttatctattttctttgtagttttatataatcttctgtgggaagtgcttaaagcatgtatatctacaaacagagtcagttttgaaaagaatttggctgaatttgggaggtgggacgcctctggatctgttgggcgactgccttgctaatggcactgggaagctcccaacttgttcccaacaggctagttgggaatgaactcagcaaacccttttggaatcatggagcctccacccctggatctggtaggttcccagagaggtgtgcaatcaatgaagagcatacagatggggagctgagtttatctagcaccttgtagccaaatttttatatagattgaatggtttggagttattgatcaggcacaataccttctgtatctttgatggactcttaattgggaaaatcctattttaagaatatcctaacataagcaaagttgttataggagagtgagaaaaaattcaacagtatggcaaattattagagcaacagaactatttattcctttggtgaaaccggtccttcctcactgagcatccagagcaacacaacataatttctggttctgccaaatagtatgtttataatttttagggacaattttatattttcatgtcaaatattagcaaatgcttaaattacaataagaatattaggcattcatatattgcagtgcagtttaccaaaaggttttcctccacattatatttttagattctcattggatcccatgatttggatggcatttagtctgacataaaaggttttgaagaattacataatttatttaaggtcatgtaactagtaagtgggatttctggttgtcaaacctaggtcatctgagttccaagcttgtatctttttattaaatggtgtgatatagggtaagtaatatgctgcaagggcacacatccatctctggctgggacttgagagaaactaaaaaaggcctattataagattttattttctagtggccttcaagtgtcatgtacattttaaccaggtaaaagcattatgttatctttagaaaattcccaggataagcatctaaaacaatattatcaattcaagagatgctcattgagtatggcctatgttctaggcaccatattaggcattagcactataaagatgaatatggcatgcttcttcccttgagtaattagtactaaagtcaagacacagagtatgcatgaaaacaaagaaaagttctgaaaaatcaactgtcataccaggctccaaaggaaaggtaagtcaactaacatcgcactcaaagtaaagatccgagcccttacaatggcctccaggtctacatatcccatccctctaacctctctgatctcatctccaaccagtctcttcctccatcattcactccaagagcaccgtcctctttattgttccctgaatttcccattggcagtggctatttcttctgcccacaactctcttttttcagatatcagttggctaactttctaaccctctcactcatcctcctctttaatactccggcctacacctctcccatcaccccctcctgcactcttgattctcctgtttatacttttttccactttttaaaaacatggcacaaatcacttatcgcatagtgtaaactttgttaatttgtccgttgtttgctatctgactcaactttgttatgttcatcaatatattccaagcattcagagaaagagaccatcactgtgctgagcaaataagattcacagagtgcttgcgttgtgtcaccgcattcttacatgtattatttccattaaccttatgtacatctggactatagctttttactcttcataattcataggtgaaaaaaatgacacccaaagagcttacatatcctgacatgactcctaaaattggtctgttgcagattctttccagcacaccatggtacttcaagcgggcaaggcaaagtgtttggaccattgatgcacaaatgtaataactaagttaaaaaaataaaggatacagatcaggataaagaatactcaggtatagacattgccagttcttagaggcagattggcagggattggaggaatagattcaaacatttgaatctaggagacataaatgaggtactagaaaaaagatcagaaatatccaagagcagagtcatgttatgaaactacgatgaagaccattccatgtaggaatcaggtggagtagggctgaagtaggtctcacaggaagccagagtaaggtggaaacacagaagtgggtctcaaactgaaaggcgagctccttaaggccttcagtagatgaatctttgtgatagtgtcccctcctcacctcaacctggcatgtatgccaggccttttttttttttgtctcgtctcactcttgttgctcaggctggagtggtgcagtggtgcaatcttggctcactgcaaccttcacctcccgtgttcaagcgactctcatgcctcagcctcccaagtagctgggattataggcatgtgccaccacatccagctacacacacacacacacacacacacacacacacatatgtacttgtagtagtgatggggtttcaccatgttggccaggctggtctcaaacttctggcctcaagtgaccagcccacctcaacctctcaaagtgctgggattgcaggcacgagccaattcacatgaccattttcttaaaattagtattcattctgtatattgtcttctttctaaagcatacttctctgtgtctctgtctgataatttaatcaatctcccttgccaattttaattctttaaaaaatttctcaggagatcgagatcatcctggctaacacggtgaaaccctgtctctactaaaaacacaaaaacttagccttgcatggtggtgggtgcctgtagtcccagctacttaggaggctgagacaggagaatggtgtgaacccaggagatggagcttgcagtgagccgacatcgcgccactgcactccagcctgggtgatggagcgagactccgtctcaaaaaaaaaaaaaaaaaaaaaaatgtctaccagtgtgtcctggcagaaacaggcatttggaaggaagtggtgtggtaaagagatcacgcagactcaggctcatctattctaaaccctagccttgtcacttgctgtctaacctgggacaggttgcttctgtaccttcgtctcagtttcctaacttgagaaatgggtttgataatactaaattgtaggctgttatgaagattgaatatatataacaaatttgcttcaagggcccttgtggtggctggcaaataataagtgctgaacaaatgctggctattttttactttttttgtcgcttaaaagcacattgctgggatttagccttcctgttctattccagaaatgaacttcagggtaatccaggaaacttagccaccttgctgggggcttaaagagtaaccataattgggagcagtgggagggagtgggggaaaaaactcttaaagaaaaactctgccctttacttttaccatttacataatcaagatgtttggaattttaatgtttggaatttaaatgagaaagacatttaaaatttggctacaggtgttcaaactgcaattaaaaagatttagaattctgaccaaagagaaaagaagtaccattaaaatggagacccttcataacttcaaatgaatcaggtagtactcagatttctacggagccaaagtaagatgcactttttctagttttatcccctttatcctaaactacacacattcaatgagcccccaaatggtatctgaacagatggatatttgcataatgaaaaaaataccgtactaaatgtcacagttgacctagtgttccctctggggtcctgtggtccttaggataaaatgatcaaaattagcagaagaatcctttcctgattcaggtgaaaagtacaggtcagaatcagaggaggaaaaagtataaactgattccagtttaagttttagttcaggtgctcagaggtagattttttaaaagaaattaatgtactacaccattcatccatttaacatttactgagctactgagcacctgttatgtaccaggcactgtgctagaccttggggagtcagtagtgaataagacaggcatgaccttgcccttaaaggacttgcagtcttgctggggaaagacaactttttaaaaaaatctcagaagtgttgctcatgttctgagaaatgtgtgtgtaaaataaatttgtgactctatatatatggttttcaattttccctgaagataattgtcaggaacaggattcatagtatgagcttagtttcaaaaactcaagaggtattccgtgtgtggatgaagacaagaagggcattttgagcagagggagatgtttgagcaggatgcattccaatgacctgcagtttactggatgtgaatagagcataggattcatgtggaggtccgggaagtgagaggaaagtgatggggctgtaggagtcggaagggcaaggtcttggagggctttgtgtgccctgctaaagaccaagaccttatcctggaggcttaggggcttatggaagatataaatagccatgtgatgcatcagatttcacattcagagagatgactggcagatagtgatggtttggaaaggcctaaacctagtggcagggaactttatcagatattcttggaagagttgtaggggagaaaaaaaaatccctctacccttctgagtctttacctgggaccccctgtaataaaagatggattgaggaccgggcgtggtggctcacacctgtaatcccagcgctttgggaggccaaggcgggcaaatcgcctgaggtcaggagttcgagaccagcctggccaacatgaggaaaccctgtctctactgaaaatataaaaattagccgggcatgttggcatgtgcctgtagttccaactattcgggaggctgaggcaggagaatcgcttgaacccgggaggtggaggttgcagtgaaccgaaattgtgacactgcactcttgcctgggtgaataagtgagactctgtttcaaaaaaaaaaaaaagacaaattgagaaaagaaaaagcaaacaggagttcgttaacatttatatctcctatatacaagggagatacccagggaatgagtaaatctcaaaaaggtagcttataacttcagcttatatagcttcttccacaaacaagagcaaatttttagagaagtgacaagacaaagaaaaaggtctcagagttcctagggacagcaaactgtgggaaagcaaataaatggtagataaaggctagtcagtacatcttgctatgctggtgctgaaaaggtcctaaaagtttgtccttcacagtagagagcagaggggctgtttttgggcaaataaggggagggcagagagcttttcttgtgtccccttctcctcagttacttttagcttaaaataatctttatgccaaagtggcatatttgggggtggcatattctgccacccttcagaatccagaaattcagataactcggtatcaagtattcaggtattcagatatctaggtattcaggtattctgagctaaagctcttcttttggaattgtttttcaaaatcctactagtttttttttttttttttagatatcatctggcatgtggaccactccccagctgtctctactttcttctgaacaaactacatggaaggtgcgtacgaagcagaagatatattttgtccgtgttgccagaacagaacagttacacagaaactcacttccagatcctccagccctcagaacaaggaatctgaggaagtatggagagaagaaagacagtgcgattaggtttccattagttggggtctagagaaacagctgagactagaggtaatgtcctattggtgaatcaaatgagaaataaggagctagagaagaaagaaaggaaagaaagtgctgaggaatccagacgcgtgacccttacaaaccttggcatatgagtgagagtgagacaggagctgagagaagagtggggtttaaaatcctcacttttattttagcaaagctaaaatggtctggtgagagacaccagaaaaaaaaaaagtgcaattgttctgctgagaaaaacaggaacactcaagtagaacaaatttatgacccccaccccctgccccctttctctttttggaaaagagattgcagtgagggcacttacattagttctgctgggtgtctgtgaaattaagaaaaaaataaaaataaagaagaatgaggaaatgagtgaaagcaactatattagaaacaatgagaagtctctggctccgtgcttatgacattgtcaccctgcagagcatgaggaggtctgatgatgagtaaaacgtcctggaaatagacctgttcagttaagtagagagccacagaggcatctccaaagatgaaaggatttcattaaaacacctaaggcctgattccctgtggcttacacagtatgtgacttgagtttccaatttcttgccccccatgactccctctgcacaagttcacatattttattgaaaagatattatgacatgcacactgggtagtgtctagaacaaaagatatactgtacaatgtgcttgagaggagaaagccctagcagatcttatagataacatgtagccatggtaaatttactgtactaaaaataaacaaaatgccgaagtagatttaacaactcacattttaaaaggcagtgtatttcaagtgtttgtgtggggtggatcagttatgatctaggatattttaaagagttttatgctgaagtcttgtgatcttaccagtgatttgaagagaatgtgagatacttggtatttaaaagccaatagcactgggttttgagtcttttttatttccattaaccattaaaggttttgacccttaattatctcgttgcatttgaagttgtatcttctcttataaacctgaaaacattagaagtaaaaagacccttggagattatctgagtggtctctgtaaacaaggcaacagaggcctagagagacatgtttaatttcagggtttaatatctgtcctggtaaggagaatgtatactgaatccagagtctgtattatcatagggttgggattctggagatgaggagctgatatatttttcctagtgcctcttcttaatttggtgacatgatagcccatgcagccctctaaagcagcaggttagaagaaaatgctggattataaaattttgcctgattatcagaataagaaatgtagccataaacagcaaaacaactgtgtaggttaatcggcctgctcaaaaccttgggacagtgttttccaagttcaaaaagaatgtaatcttgctttcttacacacatccatgaaaagtatataagcagctgatattttatctcatacagacaaagaggccagaatggtgatacttaagggataagactatgtctgttatgattatagaaattaaacaatgcaaccaaaattctaaacaaacaaaaaaattagaacgacaagggatgaaaatgaaatctttcaagatctctcatgctgtagttttcacaataaaatatggaggaggataaattatgcagtatttttgctttctcctcactctcttaacatgtagtattactgctgaaatgtacctaatttcagcacatgattttataaaggtagtgaaaccattcacattctaagttaaattgttcctgctattgacatgcaacttaatgaaattccatctagtcattgatgaaacccattaccaccctgatcgcctgcttcactcacactctcaatatcatcttcttgcttgccatgtactgatttggttctttgctaaaattttgtgaattctggctcatctatgcagtctgatattagtaatcagttacatgccttttacatggataaggtaagataaaggagaggcatcttttaaaaaaacgtacatgtttgatcgtgtcttgtctgtgtcattcacttatttaacaaatatttacggagcctactgtgtgccagaattactctcccatttgttcagacatattatcctcccctgtgctgtcactggatgatactccaaaagcacaaatatgtttgttaccagaaaggggtcccaatctagaccccaagagagggttattggatctcatacaagaaagaacttgaagcaaacccataaagtgaatgcaagtttattaagaaagtaaaggaataagagaatggctactccataggcagaacagtggcatgggctgctccgctgagtatacgtatggttatttcttgattatatgctaaacaaggggtggattattcatgagtttttctggaaaagggttggcaattcccggaactgaggcttcctcccctttttagaccatatagggtaacttcctgacattgccatggtatttgtaaactgtcgtggcacaggtgggagtgtcttttagcatgcgcatgcattataattagtgtataataagcagtgaggatgaccagaggtcactttcagcaccatcttgctttttgtgggttttgatcggtttatttactatgtcctcttttatcagcaaggtctttgtgacttgtatcttgtattgacctcctctctcatcctgtgactaagaatgccaaacctgctggaaatgcagcccagcagttctcagccttattttaccgagctcctattcaagatggagttgctttggttcaaatgcctctgacatgttcttaccattttcttgcttaaaatgcctccatgtctcttcattgcctataggaaaaacaaaacaaagcagaaaactctagagtccttagcatagcttactaggatttgatccctatctaagtcttcaatgtccctttctaccaattcgactttgtatttcctggtcttttattacaccagcatattggctactcccactgatttttctgtccttgtccatctagggaatctcatctcatacttgagaccaaaatcaaagatcttaccttctatgcagacttttcttatccaccccatcaaagctgacttttcctctcatctgagcacaaaaaagatatcttttcactgctgtctcctcaacacctagcctgtagccttgcctgaaatagatgcttgaaaattgtttccaaatgagtattaattgcctcttacctcttatcacagctgagatccatgaccacatgggcgcaaatgcttagttgactgactgatggtagaagatttactgtcttctgctaggggtttctccaactgcagcttaagctgtccaagagtctgcagttcagcctctgcaagcacatgtgcagttggtgattgcaagaaatttgtattcctaatttatatgtcactgggccttacacaggcatcatagcatgagaagcagagaaaggccattattttggcattcacaaaactccttgcctttctcttcctggaggactcagagagagactcctctgctctctgacctttcattatgtgctgcttgtaagcaaaggacagcattattatcactggcacagtctcccacaccttttgttcctggtacctggtagagaggccctgggatccctcctcctggctgagatacatttacaaagtaaaactggtattttatcatacctggaaataagaaactataatcactaatgagatttataaaattatggcccaagccgacttcgactttcataataaaacatacctcgccttagcctgccctcatctattgtcatagtgaaaaacctctggaggctgcaagatgtcctctttgaattatggattgattaaaaggagcacaacacattatttgaaggttgtgtgaaggctaaataatcccatctgtgtgagacaggatacaatattttatactgtctgtggagattcctccaattatgttttacggtctgcattcaaaaagattccagcttcttatcttatttaactctgcaggcaagtgttcagcagaatatccactccctctgggatagaggagatgggtgaaactgggatctggagttttgatttagcttcagacctagattgttttatggcaatgggagatccatttgaatttttccactgtaccaaacaagaaggagacagatggccccagaccctgatctcatcctggggttatgaagggaaatcctctccttattgtggcataaaatacctaattcaggctctggtgcacaaacttgcacaaaggtctggtagtgagctttgtggttgattatatccttctgttttcaggaccccacgaagtctggtgtcgggtgaggcttttacctctcagaattgcctgcaattgcccttctctctgccacctgatgattcctttggccattatttccagagatttcaactcatttatgtcctatattcattaggctaggatttggttatttcctaatagaaagttcacactcataacctatcatcaaacacttgaattaaataaggcctgattttcacaaatttattttatgtccttgttcaagaaaacaaagaaaagatgaggagggcatagaattgtcctattagttatccccagcaaagcactcttcctttaaggagcctaaactttatctatgggaagataaaaagaatgtttcttgataatatgagttccaaggagcagaataaatatcagactttccaaaatgctctagtcagccttctggaacaagtgatgttctctgtttcaaatgtaacttgttgaataaataattaaatgtgagttactactttcttagatatcctgttctctgccataaattagtggacccaaagttggggacctcagccaaggtaggccaatctgtgggcttcttttgaatttgggagcacagagcaaatcccagccactcttgggaggtgaagttgagcgatgagaagttaagaatttgtccatgttcaagttctccaacttgtggagaaatctgtaaaatacagaaaccggcctacaatgaaagtgagcgagtgagtgacagagagagagagagaggtgattcaactcccccctcttttttttttttttttgagacagagtctccgtctgttgcccaggctgtagtgcagtggcgagatcttggctcactgtaacctctgcctcccaggttcaagcgattgtccttccctttttcttgactgccttcttatccttgacctttctatgtgtgtatgaaccacaaaatctccttttgcctaaacttaccggagtctagttctgtcatttgcaagtccaaactgtcataaacagcatcaaaatggaatcttttgcaattcttagcaaagattcttccaattgctcatttataaagcacttctgtagttttttattaatcttccatttctttgtctgaagttaatagctgtctttatctgaaggaggatgtcccaaatgatttatttcatatctagaagtagccactttttttttagtgcttgatctaaacctgctaaacacatcttcctaactgtttccatgtaggcagtcatattcagtggtcactaagacagactcttattaaaattacctaggataattgcatcttattaaaattatctaggataattaccttttatcattgctacaggtatatgttgagtcctgggctaagcttctgaaatatagaccccggaatatagttactcaagcataatggtgttttattattattattttttctctctctcttttataacaatccagaggtttaagggttgttagaaggggaacaagtgggtagcttcactccgtgagaagcccaaattccttctctcttgtttctctaccattccttagagttctggttgagttggttcaccagcaaatatgatttccaggttatggggaaagggcaggggatttttacttaagaggagtgtgaaagcagcccacattatttctactccattgatgagaattagtatatgggatgctgtgtaagggtggctgggatgtgtaatattcagctgtggaaggaacttattacttaaaggaagaaggagagaatgggtattgtgggacagttatcagtttctgccatgggtttgtagactgatattgtagagaaataagtgcgctttatccttggctaataggacactcacatttcccatgtgccaaataaatagttttagtctgctataccctcaagctactgcccccttttcatttcatttatgaccaaagttctaaaaaacagtaatttactcttagtacacaaacttccctatcacacatgtacttattttgtaactcattgcaatctgacttgttttcataggtctgttatgaaaaagcttgctcatgggtcataactaagtcccctcttgtcaactcaatcacttcaccatgttgcctgcattagttgctattgaacatttgtttccctctagaaatgttctcattaatttctgtgactcagcactatcctatttctttttctaattctttaaccctgactcttctttctttttctttgcacatcttgttcctcttatattataaatgtggcatcccctgaaggtataaattcttcaattcttctctacccagcccttgatagtttcaccagtggctttagctaatacctaaattgatctcaattctacccatactccctttgccttatatgtacagttcaccttatcaccccaaaataatgcttcaagaaggatattgatacaaacctaagcacagttccctgttagcttccaatgacaaagttgtgttgggtgacttctctgttgtatcagagctcttttgattccaaggaacaaaagctgcctgtctactttaaataaaagacgatgattcagtggcatttgggggaagtattcaaaagttggctgacatcagcaacagactgaagagaggggtcagagctcctagaagaatcaaacacgatcatttctcttgctgctactatgctttttcctgtttttgtctcatttttcttctgggagattgaaaaattgtggtaggacctagatatcaacagcctccaaagttactttgtctcaatttcagccatctacagtgaggcttactttccctctcctctgtttctagaattcgtggagacatttcaagtggaggtgggagaaagtaagtgctcagaagaaagaagaggaatggcttccatagaagacattttagggaagctaccttaaaaagtatctatcccatgaagttagccatctcataaatgcaagtactctctctatgaaagctataactgtgaaaagaacatcagacttggtgttaagaaatctgtatgtggcttccaggcttgccattgttttagctgcatgatttgtcaagtttatgagtgccaatattttcatcacagtgatccttatgtccagtcattattgtgataactgaatgacattacacatatgaaactgtctagtttagcaccggtgtatgttagacattctgtaaatgttagctggatctagttggccaagaagtccctaagggaaaaaaaagaggttggtctggtgaatttgggtaacccacttccctccaggctagaaaataacacaaaagatccttttcctgataatctccatttataaaagacacagtatcaatgtgttctatctgttcttcagtgggttagttggctatggatattctatgcagtgcttaatcaaccttgccagttcattaggatctgtggagcagcgtcacagccttccaaaggaagatggatggtggctggcttgctcacacaataggaagctgcacatcagctgaaaagtgtacaaagcaaagtttcccggctttgcctgggcaggaggaatattttggttcaattcaaagcagacttgaagcctcattgcagtattaggctggagataattctgcgggggactctgtaagactggggggatgcaagaaagatgatatcctcaaatctggtggtattgattatgtctgtctgagaatgaatagaatcacaacctattagttgggagttttgttttttgtttctgaatctttgcattgacaaaggaatggttatttggactcttcaattcttaatttctcctaaatactgcctctaagccctgttgaaggcttggtatgaatgggaatgaaacagatctgacaatatgcaaggtggggagaatcaaaaaaagacaagctgcatgcttccacaaagctggtgggagtttctagtactcttagaaaaatataaaattcttacagattcctggtttgttatgctgaggggattgcaggccaggacctggttaatcactagactcattaagtgtttccatttcacagtatttgtcagataaagcaggctgagaccgtctagcacatagaggtacaggaaaatctggtatatttttcatgagtatctttttagacctacagaagagcaaagtcatgtacttgaatgacacacacagagtcacgtatatatacacacagacatatgcatgtgtgcatatatatacacaatatttttacacaaaattaataaaagcatatactttgctatgtaaaaaagaaggtatatcaggctcaaccaaagaagtatcactagtaagatatataaactactatacatacacatgtatccaccaaacatacatataaacatatgtatatctgcctaggaatattcatataaacgtatgtatatctgcctaggaaaatccaaactccatatgacaggccattaagaagcacaggctggaattctcagggagaagctaaagctgcagtccagaggcagaatttcttctttctttggttagtctcagctctgcttttaagggcttgcaactgattgaatcaagtacacctaggttatctaggatactttcctttacttaaagtgaactgattgtggactttttatcacatctacaaaataccttcatgagattagcgtttgattaaataaccaaggactatagtctagctaagttgacacatcaaaccatcacagaaatttaattagtaaataaactgaaaaagaaatgtctgttccacttaatcctatcataacttcattaatattgacatgcaatgttcaaattacacagtattttgtttaacaaaacaaattatccatatcctagttgggaaacatttagccattatgtttatgaatatatttaaataattaaaaatgatacaactctatcttatggaccaaatatttgtctcttttcaaaatccgtattttgaaattctaacctctaatgtgatagtatttaaaagctgggccttttgggaggtaattaggtcatgaaggtggaactgtcataaatggaattaatgctcttataaaagggattccagagcgctcactctatcttttctgccatgtgagggtacaataagaagatggtagtatacaacctgggaaagggccctcaccagcacccgaccatgctggcaccctgatctcagacttccagactccatcactgtgagaaataaatttatgttgcttacaagccacacagtttatggtactttgttttaatagcctgaaatgactaagacactatgttatatatttcagacaatttttttacccttattctgtttgaattagctgtgtgtataatcctgtatattgtttggcaagtgacttttttatgaagaaagcaaaaattaatagattttttggaggtattatatattatctaatactcacccaaatcctgtgaaatgagacttattgtatctattttgtagttgaagaaattgaagatcggagaggttaaattgtctgtgatcagggaataaacaagtgggtgttttccagattgaaatggggcccatttcacagtatttgtcagataaagcaggctgagaccctctagcacatagaggtacaggaaaatctggtatatttttcatgaggatctttttagacttaccaaacagcaaagtcatgtagttgaatgacacacacagagacacatatatatacacaaggcttgtgtttaccccaatgggctgtctttgcccgtgaccatcacccactgatgaacacaggctctacataaccaggaattgtagcaaatgaccacatctaacattgattgttcctctttgctttttaattatccatctaatctaattttagaattagactgagttaataaaacagaatcagcagatgctaaaggaaagttcatctcccatccccccgagtcagttaactgttctcagggagggatggggagaagggaagtgattggaagctaaccacagatcaaatgcagggaaggagaggatggacagtgataatttaggagcagttgcatgtaagaagacttaggtattcaccctggggggctgttaccaaatatgcttgtcaaatgtactggtatcctaaaggaatagtgactttaagaagcagaggcctgtgattgtcctatttctgaatttgttcctgattatttaagtgacattgggcaaatcattttacctctcattgttttcatgtcttctcttaaaaaatactgtgaattttatgaaacttgctctgaactgtctccaagggaaggtgtgtggataaaataaactgcgagttgtgaaaacgctgcagaaaatgtcatttaaagtgctatgcaaatacagtgatgcagagtgtgaatgtagatggagggcactgccttcatttcttctgggttgaatcatttttggtcaaaacacctgactgtacttcttcggtgaccctacagtctgtccatgacttgacttgagtcttggagctttctagtatccttgaggttagcacagcatctcttttcgcttgaagcttctggctagggtaaattcatcagcaactcccttgaaactagagcttggtgctcactgtgtaaaattttttttatcaaaccatctaggacagaacatatgcaccatggggatacaatatatagtgcttttctttcctgaagaagaattgtagttttcaaaagaaatgccttcagattccctctcttcacttcctccagcctggtgctctctgttgcactattagaatcagctaatcagacaaaacatttgatgagctgtacctcctttcttccacttgtttattattcttataatcctcccaacaaggtcagcttaaccttgatctatttgaaccaaagattttgtgcttatatttactgactcccaattacctattgaaacaaacactttggacatgtggcttgattcctactatttcccagttgcagaaaatcctacattgttgcactttgattctgaagtgtattcatggatttttctctattcagtactttgtactgatattcagtgtaggataatgcaacaagaagtgtttattcccaaactacacaccagtggtactgtagggtggattcttgcaacctgaattttaaatgtcccagattgttgacaagcactagattacagatttttcaaatttataatggcttattgagatcctaggtgaaacatatcctaaactgctgactaatgaaaggctcactaacttgaaaaacagaaaaatagaaaaaggcatgaaaagtaaaacatgtacttgcttgattgagaagccatgagtctgtgcacagaaggacctaccatcaaaccaggattttcacgagaaataattttcagatatgcttcagcacttggctgaaactgtagttttatggattctttttgcatctgtcttgaaactgtggttgaagtcactgtgtgttgtcattcaaaatctcctacaaaatactccaaagaaacatatcatagaccaaggctagaatagttttagcaaggaatttagcaggaaatggcagtcaccccctatgacctgtcatttcattagttacatatacacaatgctaaggtattgaatatgagctattaattcacttttatccaattctctttccaactttttggaaaaaattcccttgttctgctgcactctgtaccattcattaactgtgaccacaaaaatcctgagtggagcaaagaattcatgacaatgaggcagccataaaaatacatgcctgggcaatgaatgactgtacatacaaggtatcctcagagtatgtaataatagtaagggccagaatgcctcttaagacaacaggctggcagaaactcaaccatagcttaaacaatgatattacatcaaaagagaaatatgtgtcaaataaggaggtagaggttgtgatcaactgcaaaaatactattgttgaagcttctatgcatccatgacttttgcagtataactttagaactcctcttcaaggtaggagtccttgaatataaactaaacttttcatcccctttggctgataaaatgcaatagaattcatggtgttgttaaaagataaatggagatacattaaaattttaaggagtatatttcagcaggtaacatattgtgaattaggcagaccaaagagagttttggggctctgccaaagggcataaggggaagcttttatagggtcaactcagaagcaaggcaaagaaaatatttgcatggttaaagtggagcagtagctttatttggatcattccagggcaaagtccctagttagagactggttggcagtttcttattggttaagcttaagttttgtttttctatttacactgagttgggttttggctgacttacatagggaacactgtgtcttgagtcttaggagagtttgttacgcagcaatagatagtgagacagaggtcataatcttaaaaaaacgacttaagagagattaatattattgatatgaatataaccttgtccaaaaatgaaatctggaatataaaaacagtctagttacttgggctttcccagagtttaagtgaggcacccctgaattctgactcctcgccagactggcaatgtgagcatttcatgttccaagaagttaagatcctattgttaatttacatttgtattttggatttctatccttcaacctaatgtgaatttgtctgatcatctcagacaggctgtgatgcaaatgtgaagtttcccttcacactgaaacttgcctaagaggacatccctgtctagcatcaacattctccttggtaccaagcacagggttctactaatcaatacagactcatcaaatgttagagatattctgcaatggaaatgctttactttttaaagtaatggtgtgcccatatgtcaatagcaatgggtattacaccagaaatatttgtcctgtggatattagctcaatacatagaagaacatttagtcttttagttcagtatagtgagaaaatacagggctcaattcactttaacacaaatataaattttgaaatagggaagagagtttaaactgtgtctttgtagagtattaaaatgccatcttctattgatggatcatttctagttttggcagttattagagtacagattttgaagaaatggtaataaacattactagttggtaataaacagcacatgctaagttctttggtttctatgtatgaaatcaaagactgatgaaagtcaaagaaaactatagtctcatgtggctttggatagatttgtccataaagtaaaaaagagaatagtagttttcagtatcactgtggttatgcctagaaatcttcactacacgaaatgatgaggtttacatgagcagctggggaggaattcccaaatgagtgacattcacgttggttactgaagtatgaataggagtctgacaggtccagaaaagagggaggagtctcaggaagaggtatcagcatatgccaagaacagaaacatacaagataatgcttaattgaaccaaaagctacagtattgtgaacacagactactttgtgcatatatttatataaagaaaaaataccagtagggacaaacacagcagggaagatcaattagaaattttgtgaatcaggattttgtttaaaaagaaaaattagattactttaatgaagcaaatagacatattaactttatcagtcaggggctccaacttctgtgtacggctttggacagagcccccaagcgccctgggtatggtaaataactaggagtatgaaccaaagcactcattgccaggtattacttttcactctctttaaggaatcagatatattattagatcagagggtgctgacgctttattattagtatttaatggtgtgacttacgggaatttaattccctcactttgagtgaccatatattattattctacttgtgattgggcattcacaatctgaccttattagctgcaaacagatgccagactcagctcagttgtgcttccctggggaatggcaaacagcccattacaggccctgccttacaatggttgaacacatggaatcaggcaataggtctccagtcagggaaagccagaaaatagaaagcaaactgtttttcttacttctcattaaacttcttacttcacactgtcgtaagcctgagtcagactcagctcttggtcaggggcctataattggcttattgtaattggctccctgttttgcctgccctagctgtagactgaaaatgacctgaaatgctggcagagtcttctgggttttgacatttcctgtgtgggatctccatatattattgcccatcagtcaagcaggaaaaaaaggtatgaaagtatagtaaaatcagttgaaattccataactggtcatagtcagtttcctgtttcctagggggaagactgggtagggtaagtccaggtagtttgagtcatttgggggctacatttgggagaaggagggtacaagtgtcatttgacaaaaagggacaaaacctttaggcatgtcaaaacgtaaactttagcattgagttggagagggaagtctaaaactgtgtcaaaagccaatggtgcttgaagaaaaaaacaaagtgggatgcagagataggaaagagaacagagtaatcgatgggctacatgaggtagaagttgtctcaatatataaactggtgacaaaggcaggatcctgacatgcaattcccacatttttgcacacctcaattaatttaaataataggatagatagaatgttataaataataaattaaacatttgaataaccctattatctacttttttttttttttgacagggtatcattctatcaccaagagtggagggcagtgccatgatctcgggtcactgcagcctcaacctcctgggctcaagcaatccttccagctcagcctcccaagtacctgggactataggcactctccattacacctggctaattttttggtatttttttgtagagatggggtctcatcacattgcccaggctggttctgacctcctgggctcaagtgatccacccacttcagcctcccaaagtgctgggattacaggcgtgagccatcattctgggcctaagtaaccctatcatctaaatatgcctcttaggaaattgcatcatagtcttcaagtggaagaggcacgttatttagagtatattgactaagagtgcattttctggcctcaggaaaaaaaaaaggtttaaatcctggtgttatcaatgattagccatgggaccttgttcgagtgcttagtaattctgagccttatttttttcccatctgttaagtggggaataaaaatagtatctcccctataagtttgttgtattcattgagataaattatataaaatattcagcaaagtgtctagcatgttgtgaatgctgcatatttattaactgctattatgatttggtgggtgatgatgatgttgataaagaaaaattagtattttctggaaacaaattagactgagagaacttgtacagctaagttaaagcatccagctatagtttaaaatcctgagatatgaatttacctggtgctagacctttaatttcttgtacggcagatttggttctcatagcataattattcttacaaatgagccagtgctctaggtctttttctgtgggtttgaagtcaatcagcaaaggcctaagtggtttgtagttagagtgttagtcagagtgttttccacggtatctcattagcagattgtgtaaccccaaggccgagtggagactggctctgctgggcgattgtgccgatgctgtgcattttcaggctcttgtctgtacatacagcaggttggatacacatttcctcttcttgtgctttagtagatacgtggccaagtttcaaagacagttttctgttcaaacattgtcactatttcttcttagagaaagaagttgatgtgaggcagatggagggcaagtagggagagacagtggttcatgaataattccttgacagctttgagcataaatgtaggtatttaggaagatgagtatcaacttgcaactctcactttttgcagacgcattgttcctaaacatccctaatgctgatcatagctccagggctagctcaatgcagctatgttaaaaaatgagcatttgaactgttataacatttgcaatgtaaattttttttctagttcattttggtctcaggctgcctgctaataagacaggtgtatctactcatttgtgtgcaaacatttctttgaggtaaaccaggtcctggtgcattcatcaaacttccaaatatggcaaagagatctttgtctccttatgagcctcgttccttgaataatggtcctctgcaacaaattggatctacattgtctttagtctttagctttctctcttattctcccgatacacaaaccctctctttgaaccagactcagtttcctttgcctgcagcaggtggatttactgagacttgagctacaggttcagggctgacccattcctgaatgagtcctgaccaggataaagagagtgtctggagccttatctctgtttacaggtgagtagagtccaggtgttgtcttgcttccccaggttcagagtctgactatctgcagagttagttgggctcccacatttcattcagctgtagcctaaccactaccatgtttattttgtccagaccccaaaagatttttcttgcctcacatggttaattagcataatattgtttgaacatccaagtgaattgccaacatttaaaacttggagtcctcagaaaaaaaaatatgcagatttacagctgagatctagcaaggcccttgccttcattcttggcaatgaagaatatatgagcttatcacccctgagcagcccttataattcatatttagtccacatactggttctggacccctgctcaaaacctcagcctgtttaactggagcactggctacttgctgagctcttttagatcctctcctcccgggccaggagaggtttctatcccctggacccccaaccgctgttgtagtctgtctcactctagaaagatagactgcattgaataatgagaaactgtaaccacctgggtcagcagatagctgtctaagccccctttaattctactttaaacactgcttaagactctcttggatatcgatattgtccaaatacgtaaaactgtctctgcactctctcattagatttttggacaatgccttcaagactctatcctacagattgatcaatttcctaccccagttaagcccattcctactttccttcccttgttgactagcccactactaaaatcccagcatgatgaccttgcatcaggtgaaatgattttagctttaaccacaaacactcaagtagcttaaacaataatcagattttcttctcatatgagaagataaacatagatatgatagcctccaggcttaatacttcagtgatccagctccactttcctgaaaatttcttggctctgatatctgcttgttggtttcatcctcaggttggctgaaagatgactgtagcattccagacagtaaatccatatatccagatcatctggatgaaaaagtagaatgccggctctccccatgtgtctctttcaccggctaataactttttcacaggttcttccctgtgggatgtcctttcacattttcttggccaggattgggttttctaacccttcctgcaccaatcactggcaggacaggggaatgaataaccttgattggcttagaacagggagcagcacactttttctgtaaagagcacgaaagtaaatgttttcagggttgtggcccataaggcctctgttgtaatcgcttaattttgttgttgtaatgcaaaagtaaccatagacaatatgctcatttatgagtgtgtctgtgtccagtaaaattttatttataaaaacacacattcagtttgaccctcaggccatggtttgctgatctttcgcttgcactaattaggacttgcccatggagagagggaccatataatttttagtacacatcaggacacttttgaaagtgaaagggaatgctgttatttatacttaaataataggcataaattaaaattgtactagagtcatcctatggatcatgtgaaggagggatacaaacctgaacaaaattgaattctaacagaagaaggaaatggagtatattgctgccgagataaccaatagtatgtgtaacaaatggtaatagtgagacaggaatcctaagacgtggaagcagagcacaggctgagggcagatggacgtgatgtggaatgagtatgcagataacagagagaggcccctgtgctggactatagtgaatgaggaagaaagcattatgagttcagaggaggcactctccagaccacagaggaccttcaggccatggtaagaaaattagaatttattctaagcgcaataggaagctgctggttgtttaagtggaggtgtagcatctgttttatgttaggaagatgctcttgttgttgtgtggagaatggattggaaggtggcaaaagtggaggcagagagaccagttaggacacaattatagccctgcaagcaagagatggcagtgacttgaaaaatttagcagtggaaatagaggaaaagaaactgattaacggaatgttttttgaggaatagcaaaagaacttctggaaagattatgtgcgtgtgtgggtgcgaggggggctgttgtaggtgggctgggtaagagaaagaaagcaatgcagaataataatatttacacagcatttattatatgccagtcttttgcatataggaattcattgggttgatttaaccattctgtatgttaacgatcttcatttttgaaatgaagaactgggacaaggagaggtcaagtaacatgtccaaaggcacatagctgataaacgacagagtcatgatctgaacttaggcatctgaatctacacttttattttttatgctcttccaactcttgtggtgctatactgtgctgcttctcacaacactcccgtgacccaaggctgtgggctggagttgccaggtagatggagctgcaatctgccacagggagtttccccttctttagaatctatccagtaaatcagaatgatgcatttgtcagtgtcaccgaataatgacatttctttattcttgtttatctgtggttatttgctcacaatttaatttatagttgcttattttatcacatcattttaagtcttcgctggttcactggactgaaagctgactgagaaaagaaactgtatcgtcttcattttgtatcacccatattatgtagctctattatttgcatgcagtagatactcagtatatattatttcatttgagttggaaagccctggactacttattttctaaccatctaattatttaatttaaaacttgttaaaattctccacaatgatttttaattggagcccaggggcaaaacagcactgatttgaaaggcttgtctgaatgttagaatgctcttaagaaatgtgattttattttttcccggtgttttactttttttaacactcaagtttttaaagtgtttttaaattttaactttttattttgaaacaatttttgatttccgttatacatcccaaaaatagtccaagcaagaaattcccttgtactcctcaccaagacttcccaaaggctaacgttttacataaccacagtacaattatgaaaatcaggaaattaacattgatgcagtactgctattctcatctacaaatcttactactcttttggcaattgtcccactaaggtcctttttctggccaggatcaatacaggatcatatgctgcatttagttgtcatgtctccttatgtctcctttagtctgagatgggtctctagcctttctttatcttttgtctctagcctttctttatctttcttatcctcgacacttgtaaagaggatttggccagttattcggtagactgcccttgtttgaagtttgtctaatatttcattatgattatattcaggttgtagatttttggtaagaatatcacaaaagtggcattgtgtccttctcagcgtgccattttaggaggcacaagttgtcaatatgactgttactgcttaggttaatgttgattattttccatgtaaaggtcactgcacacttcctgtgatatttctacttgtaaccaatatacactgtgggttttttttcactcaggtataatatggaggttcagtgttctctaattattgttgcttctaccatctcattgaatatattaatatttttagttgatggaataagcccaagacagagatattcctccctattttacctaagagaaaagtaaaactttcatttactttaaaagttcagctacttgttccgaactttgtaagagacctaaatttaaatactggtatggctgatgccaaagttccctctttctgttataccatgtaccctctttagttttgtaatataaaaaaaaaggcactgttgacaagaaattctttttaaattttgaaattttgtatttttctgtctttaagcatgccttcaaaattctaataaatctagaagaaatagtgatttagatggaaggaggcaaatgagtgcttttgctgattaacttggcatgcaggacacattcagcaaacaataaattaagaatggttttcagcttttccacatctgcaagtgcttcccaacagtctgtctttgaagacatctctgtgttgaataatttttctacatggcaaatagctaagaaaaaaacccacagaatgcagagtcattgtctaacgagtggaaaggctgctgagttctctccaagggaccatggacctacgtacagtgttccagattccagacaattactacttgacaattcacctgtgaatttctgtgctctgtcaagtcaatacattcttaatatgttctccatctgcctgattccctaggcttctgttgcccagggtattcacctaagtttgaggaaagtttgtgtgaagtgatttcctttacaactgtgcaaacctgaatggaaacgtgatgggcctaacagttatgggtgtaagaacacctgggggatttctgagaattcatgttaacttctctgggtcccagttccttgtcctgatagatggagtagatgactgttaaatcatactgaatatataggtgtcatatatatctagcatatatatcatattgagttcacgtacaattaaatatcttcacattttcaattattcttgttagatgccaaccaattaaaacatgtttcacctcacttttattctagcttgatgctaaaatcctgtgacaagcccattcgtgatttgttcatatgtgtcagtacccaacaccatttttttccatgaagcaggcattcaagaggtttgtgaagaatgaaagaatggtaagcattcatctcataactcggtgtctgagttgtctcatttgacaactcaggatgctgctttgaagtggtctttttgtgtttgacccttccattaaaactgctttatagctgtaaggaaaataattatacaaacttggataccttccgtgactcttcattacccataggaaatattttaagttaattaccctagtataaaaatgttgtctattatctcgggtacctttcccatttcctctcatcacttttcaccacaaactctgcatgtgagcaacatcaaactgattttctttctctcttccttctaacctttacttcacacactcgaggagtgccctgtaacttgggagtagaggtcttctttgatgcccattgctgcttctaaaatgtacattttgtcgactttgtaactcacccaagtgtgtattaatgtcagtttctacagtctgctatcttttctggttgctataaagggattgccaattacttgctctcatgtgttgttaatgggcatctgactcactgtttttactttttgctttttaaaattcctgctactgtgaccatccttggtcatagtatagaacaagatactttttaaaagtatgttaccaacaactagtggggaaagaaatgattaacagtaaaatattagtatttcatcaaccacaaggatgatgcatcaaccttgtcctctcaggtctttaacagcctgtctttcaatattttccttcaccctatctcatctgtcttcatcaatgactacctacttgaattttcatcactgtttctgaacgacccctgagctcttgacctcaggcatctaattctctcatcaaaaattgtatcctttcagctatttatttcattactactaatgggatcaattcttaaatatcatggagttgtttcttccatgggccctgttattttctcagtattaaccattttcttctttccttactcatgatatattttacggtgcatcattacatactcctacagccacctttctttctctctatatctttttctcttttgttgcacttgcctgggaaaattccaaacccggtgaaatccaactttccacttagtctgtgtgagaacctaagcagcaacttaatgtttgctagacaaacacatacacgtacataccaggggttgattgtgtgcccaccacccttttgaaaacatacttttcaaggtcaataatattcttgccaaattgatgctcaattttctggcccttcttaccagttatctcagaagcctctgactgagcttatggctccttcctctgaaaatgctgctggtattgcgttcattatttttcactcttgtttttcctcctgtttcacaggatgcttcttctccgactctttggcaggttgctttcctatcctttagcttcttgaagcttctcagggtgccgtcctaattcctctcctccagtcccatgatactcactctcttggtgacatcatccaggctcatatttttaaatataatttattctgaaaaattataaaattatatctatagttctggcatctcctctgagctccaggttcctatatcagaccgactacttgccatttccaccaggttgcctaatagacatctcatacttaatatacccaaataaaacactggaattcttccctcacagcccccaaaactctacctttccagtattccccattgtattaaatgacaccaccattcgctgtattacttaggccctaaacctctgcttaaatgtacatacttcaagagatctttcctgactaccaaatttggatatttagacacctttatttcaaggtgactaggatattgatgtcatgggtagaagaactttgtttatcttgcccagtgcttaacaaactgccggccatacagtaggattgcaatagtgttgggaaatgaatggttaatgaataaccatgcatttggcaaaatgaaattcaataaatatttcttataaatcttagatggaagattttttattttagcaggttagctctgaacataatgtcctgaacaaatatatatattagttgtaaatcatttaaaaatgcatatgtatttaatgtaacatatgaaacttgcttattctcttcgataaatatatagcattgatactttcctaagatgcaatgaattgtattatcttaaggtaataaaaaaatacagtgttaccacaactaatggaaaagcaaatgcttaatggtaaaacattagaaactacaatgaaaaaatgatgaccactaaaatcattgttatgcaacattttgctggaatttcttgtaaatgcaataatacatgaagaattttatatatataatacataaatatgtattttataaatgaatatatatttacttgtatatttacacatatacattgtatatgtaaaatataaacatatgaagtaaatatatgtcaaaattttttttgcaaattctaagtctagaaatataaaaaaactagttgataaactcatcattagtgaaagagttcaggtaatacatatatagaaaatgagaataaatctgtagattctacacattaatttgttaaattaatgtgtagaatcaatagacattttttattacagaggacaaataactatacattttagtaatggtccctcatgaaactggagtttaaaaaatgtaatgaggataccagctaatggcatatgccctgatatggtttagatatgtgtccccacccaaatctcatgttgacttgtaatccccaatgtcaaaagtaggacctggtgggaggtgactgggtcatggaggtgttgctcacgaatggtttagtacaatcctcttagtgctggtctcatgatagtgagggagttctcatcagatctgttttttaaaagtgcctgttaccacccccagcactctctttctctccagctgtgtgaggtgtctgctccccctttgccttctccatgattgtcagtttcccaaggcctccccagaagctgagccgatgacagcatcatgtttctgtacagcctgcagaactgtgagccaatgaaaccatttttctttatcaattacacactctcaggtatttcattataggagtgaaagaatggcctaatacacgctcacaaggtaaaagaccatgggagatattttggaaatagataagcagataagagactggtacctcacttattaccaaacctgagaaatgtgattctaagctgccagtggggaaaacataagcaagctaatgtatactgtgggcttatcaaaggctcaggaacgagtggcagtaggtacatgaggatggtcaagtagtgggtgattacggagcttaaaagagagcgagtgattgacagcctggcagggctgtcaatggtggctcacacctgtaatcccagaactttgggaggccgaggcagccaccctcacttgaggtcaggagttcgagaccagcctggccaacatggtgaagcccatctttactaaaaagtacaaaaattagctgggcgtggtggcgcatgcctgtaatcccagctactcaggaggctgaggcaggagaatcacttgaacccaggaggtggaggttgcggtaagtacaggaggttgcaccacggcactccagcccgggtgacagagtgggactccatctcaaaaaaaaaaaaaagaaaaagcctacgtagactcctagattctgtccccaacttcacccatgtgagtgactgccctttcctatggtggtagcagaaaatcggaggatactagggggaagataacagcaggaacctccaggctcagttaagagtgctagtactaaaagaaggaaataaatacatgtttattcactgactactgagatcctcagccttcttttttagtggctcttggaaggctaagaatccatttgtgccctttagtcaggagatcttaaacaccttttctggttaatgtgaccagtccaggataaatgactaaatactataacactgtatttgtgtgtgggggggcaggaggcaaccaaagtatatggttcagtgagatcattctactgtgcaacaggttctgctactttacacagtgtttctaattaactttttagttcttctttctgaattatgagaaaacatgaaagatcaaggccaacacaatagacattaatgaaacctggaaaaaacagacaattccaagagatattaaaaaaaattaaaaacaggagaaaaataagatatgtaaaggacaaaatagaggtttaggaaatgaaaactacaatttcagtaaagcagaatttaaaagaagtattgacaaatgtcagagagatgaaaaatagaagagaaaaaagagaatgttaaaggaattgtctaagaagtacaatggcagagaagagttccagaaaaagacgaaagagaaaatgtataaagggacaaaatatgaagtaattccagaatgaaaaggttcatgagggactcaggtttcctgatttggagggcccactgagtgcccagccaaatggatgaaagtcaacccacaccacccatgctgagaaatttcagaacacattagagaaaaagaacatcctaaaaccttccagagggaataaagcaggtacatgtaaaggaccaacagtctgaatggcaaagtgtttctcaacaaagacactggaaactggaagctgttgtggagctgcctttacacttttgagtgaaaataattttcatcttaaaattctatactcagggacattatcaatgaaatgtgagggcagaataaaggcatttgtagacatgcaaggtatacacacaaaaaattgcctcccatgcactatttttaagggagctactgaaagatatgctctgccaaaatacagtagtgaagcatgaaagggaagaaatggaatcttgtaaaccatggatccaacacaagagaaagattgccaacattagagaaagctcaagggaataactgaattgagggagaccccacttcaagtaggcctaaagtgtacacatctccatggaaaactcctacaagatgaatgtgatagaacacttagtattttttaatgtcttgagaggattttgcaccactgggaaagaatatgaagatgaattagagagtagtacatagaaagctatgccctgcctcctttccctcccaaaattccacccaaacaagtacataaaaacaagataattacaatgtcagggaaaataaaaagttcataaggaaagttaaactactcctctgctgtcaataatatttacataaaaataatgtaaatattgattattgattaaataaaaaataagatattggaaggatgagtggggagactgcaaagtaaatcttggtttgtactttctacgggagaaaaatcaatagataatccttaaaaatgaaagtcaataaatagttatataagcagattacttagaaatgtgggagtaaataccgaaaggatcagctcaaagtgttgaaggtggttttgctcctggaaatcaggaaaggtagatggggtgttgatggtaatggacttctcttggttgtaaaagctttgtagagctatttgatgatttattatctgtatgtgtattaaattttgataaaaatacaaatttaataacagagacaaataattattgaagagaaataacacttcatagtaacaacagaaacaaaaatacctagagataaccatgaagaagaatatgttgttgtcatgtgaagaaaatggcaacattttatgaaaagaataaaaatatacaaattaatgaagaaatatatcatcttcctggatagaaagactaaatatctatttttaactttacttatagttttaagacagtatcaattgaaatattagaagtttggagactttagtgaaatgatattaatttatggaaaatataggataattttgaaaaagtaaaataatgggggaatctgccttttcaaatattgagttattctaaagttcaaccagagtgaaattgacacattaaccaagagacaactcaatggaaaataataaataactgaaaaaaaatcaattgtttatataaaaacttacgtaagtatttaaagcaccaaaaataatgttcagaaggttgatgtttgaagtattagggtagattgtaggacattttagaaaatatgttctcaaggaattaaagggtttaaaatgtttaaaactgaaaatatctttgaaaagataagcaatatttaaattgattacatggataggattgatttttttaacaataaaagccaatggaatgaactccaacacaaagattattagtaggttgcactatataaaaatagaaatttttgaatgtcaaaaaaaaaaaaaaacagacaaaaaacaactcaccctgtgcttgctcagtctattggggctgactttagggcatgcagttgggggctggctactttggtgttgaccccacatccccaaccagtgatgtgcactttactctggcttataagaccccctctctaggctcactcctccacccagagctaggcttctctagctccctcaattaacacactgaatttctttaaataggtttatttctgtttttgtttgtttgtttgcctgtacatcagcaccagactgtcttttactgtagacaggcatggagcagggactaggggtggctatcaggggtcttccatgaacagacttagccttctccttcatttccatcattcacctcttcctcaggatccttcctgaaggtctcctgggcagacgagattgtcttctgcttaacttctctcttgcttttctaggctgtggtttcctctagtttgtttcaattatcaatatgcctccatctatttttgatatccaaaaatctgctgaagtctctactctgctaatgctccccttgtgttctttttgttctgattttattcccccttttacttctgtatcatcattttaatgggaactcacaagagagggagaaaaacattgtgtgctcagtctatcacctggagccagtagtcttttaaccagtattgtgcgaatatttgatttaatgaaaaactactctataatatgtaatataaaatgccaaataataaaataatcctaacaaaattaacatttcattaagatatttttgataaatcagtataagaaacactagtgattcactgaacaaaaagtaagctaaagaaattcaaataaccaatagctatatgggaatatttttaactttgctagtaattaaattaatgcaagtacatgtaacaataaagtattcttttttatgtattaaatagactttttaaaatttttatattaatactacggtgagtactgtgaggtggccactctgtagacttctactgggcatgtgtgcttgaaatgctttgagaagcactttagcaaaatgtatcaaaggtacctaaatttcttcttcaataccacttctaggtatctatcttacaaatataataaaaagggtggataaattattgcaacattactagtttaataaaaaatggaaacaatacaatcaacaataacagaattttaaaaataaaccataagcttacatattaattattacatagctattaaaataatagtttaaagaatatgtactctcacaagaaaatgtgcataagttagatttttaaaacttactccagaattcaaataatatatacaattatggttttcacttttggaaaaaaaatgtagataaacttccctgtatcaataagatggaattccctgcctttatgtttccttagcttcgtatatttagagctggttacatttttcatcatagcatgtttagcttggttgaccatgaggtatttgatagaagggatacattacattattctttatatttgtgattttcatcaaggggcctggcgcataatagatgttccataaatatttgttgaattgttaaatgaagggaaaaatgattgattgaatcaacgaataaaagtgaatgaatactatacctctagacatggggagttggtcctggtgggttgtttactgcaggtagaatacagaggtgaaaagaaatagaaatggaagaaatacaggtaaagttatttctttggccagaggagcaatgcagtaatattcaattaaacagggttatacaaagaaataaagggaatgagaccaaggaaggataataaagattcatcatagtactattgaaaattcactggcttttacatcagaaacatttggagttaaatcttagactcttcttgtattgtctatgtgatcttaaacatgcagtagaaatagacataacagttctttctcagtggagatgaaatgagataatacgaaagtttcttggtacttggtaggccaataatgagataaagtaaaaaaaaaatggacaaactcaaggagagacagaaagataaagaaaactagtttttgataacatgcaacatcaatgcaaagtattggaagtataaagtactgtcttaggggagagtcagatgtgaaagccactatcttgaataataaggaagcatgcatttttaccactggtcatcttataattttcttgctagcagtgaatctaaattatattagcaaataggtaaaaataaccttaacaatgtgccaagtctattaaaaaatattttaataccaggtccaattgagtgtcacagtatttacatgacttatatcccattagagttcagcaaaaatactaaaaataattatttatggtcttttttttttttttttttgagacagggttccacttctgttgcccaggctggagtacaatggcacaatcttggcttactgcaacctctgcctcctgggctcaagccatcctcccacctcagcctcccaagtagctggggctataggcaagtgccactaattttttactttttgtagagacagggtttcaccttgttgccctggcttgtcttgaactcctgagctcaagcaatccgcctcccttggcctcccaaattgctgggattacaggcctgaccaactgagtacccagccttttttattgatgagcgtagggaaacagcattttttcattggtgtgagaggcggtggaatagagaggttcacaatagttttgttttcaagacccagccaagtgttaaagaatatattttgggttcacccacatttttgtccattagataatttggttgagcctggactttgaagatagatggacctgggttcaaatctcagttttaatacctacaagctcggtgatcttggaactaactgttaattaaactgtgggagtccattgttctcatttggaaaggaaattaatggagtgattttctagggtattgtaacagttaataataatatatgcaatgtgcctaatacattttttggctttagtgagaattcaaaatttcaaaaattctttgaaagttggagtggctaacaggcacttgaacagaaattgcttaaaaatgcttatccctataccattgcaattgatgcgtttcttagattctgatatagatttttctaggcaagcctgcaagggatttttgtctactccctcggggttttatgatgactgttttgcttgttctctatttgtgccagaaatggtcaggaaatatttcaccagtgtagaaagatgcgcctctaattctgacaaccagcaattctcttcttgcagcacatcttttggacataaaagtgaagagttagagaagtacatatacctcattcatcacagcttcagagaagcagatgctatcattctagaatcaaaaatgagccttcgacttgaggagaaagagagaatcaattatactggtggcattaaagcatcataacaaagaaacagagaaactcagaatgagatcttatattttctttaagttaaagaagtcaagcttccattctttatccttggaaagaacatcaatgagattgattaagaaaagccagttgaatgttaaaattatacagcatttttgcagctcagctgtaattcatgcacacagtgggcgattacctaggcattgttctacagaagaaaaaatacattaattgcttcttcccttccctccttcctaaaagcctaattagtgatttatccttaaacttactgctataagtagtttcattattactttttattttcatttttttattttttatttttttctagagagagtgagatacaaatttaaagttcttattagttatggcagccagtgataaattagtatgactcataccaaaactttctctggacagtctttgggggttcagattttccagagagcaaactagttacctgtgtggcccaatatttataataacaaagaggtaattaggcttaaaatttttcatctcaatttttattgttctatagctgtagctgatatatacccatcaagggaagtttatttttgccaatactggagaaaggcttggcactttgctttggcatatcttacggcaaacctcttttgaaagattttagaaattaaccgaaccaacaagcatctattgagaatctatattcaatgtacttttcaaaggctctgtgccagtatgtcatgctggtcaaagacttcactctttattatagccccaagaatttaagcttctctgtggatagccctgatctcaaccacagaagaagcaacagaaaaatctgaaggatctaccctcaggcagacccatgctcaaatgctggcacataaacttgctactgtgttatgtattattagtggaaaataggaaatgtatcaactctctggcaagtatgacttttaattagagtctgaattaagtgttcctcctttgtattcccttagaaacttataaattgctttatcatatgcacttatggctttttaagttgttaatttacaagtctagctccattaaatcatgagatccttgaggttttggtttgtgccttattcatctttgtaacctgagcacttagtgcagggatgtgtacctcctaggccctgaaatgctttcaaaattgaatgtcaaatgtaaatcaggttactggaattcagaactaggaagtattagtgctggaaatgactggtagtccattgttgctatgcatttaatacaataaaatctttaaatagtttccgactggtgcatatttatgttttctgttaaattttcaccattatggataatactgcattgattacatatgtgttcatatttttgcaaacctatgtgatcatctccttaagatacttttttttttccctggggcagtgtcatttttaggtctgtaggtttgcagtttaagatgttgctgcatattgctatgctgtcctccggaaaagtggcacactgtcattagcagcacagactgtccatttctccctgttttgtaatcaacattggatattttaagtctttgaaaatacctttccaaactgataaacacaaattaccacttttttcggtttgtattttctgatagttaatagggttgcctaatttttcatatatttatgggcactgacattccttcatacatgtatgtcctttacttagttttctttttaacaattgttatgacgctttatgtaacatagtttgtacgcctttacctaaatgttttatgaaaatgaatattgtatctgacttgagggtatttctcctacctagtactcatttggctctgatgactggaggaacaccagggtccttggtctcctgctggtttgaataaaacaacacaagacacatgtggagtgattttaaggagtggagaatttaataggcaagaaagaaggaagaggctcaccctgtacagagacagaggaagcggggctccaagctgaaagagggaatccccagtgtggcagaaaacagccagttatctgaggagactggaggaggtggtgtctgatttgcacagggcccaggggattgatttgaccaggtatgtcattcaagtagcccgcagaaaaactggcctccccaccttaagggaggagaccacccctcatattgtcttatgcccaatttctgcctccaaagaaagaagtaaaaactaaaaggcagaaatgaaatccacaggcagacagcctggtgcggcaccctgggcctggttaaagatcgacccctgacctaactggttatgttatttatagattccagacattgtatggaaagcattgtgaaaatccctgtcctgttctgttccgttctgattaccggtgcatgcagcccccagtcctataccctctgcttgctcaatcaatcacgaccccctcacgtggacccccttaagagttgtaagccccttaaaagggacaggaattgctcactcagggagctctgttgttggagacgtgagtcttgccaaagctcccggccgaataaagtccttccttctttaactcagtgtctgaggggttttgtctgcggcttgttctgctacaaccctaggctttgaatatgcaagtgcaggacgccatgatgttctacacatgtggggatatgtggtggcggccatgttgccaggcgcacatgtggggacaagaagaagatgaggggaatcgctatgtttgggtggacccagtctctaatggccagcatttgcatattaaagcttgccagcggggctttaagagtcagggcttttctgctagacaagaaacatttctagagctgctttaaaagaaaaaaaaaattacaaaaaccccttttcctatctgcctaaaataatttattaataactcctataacagtactataaaacagaagacatgtaaatccaccctttgagcaatattacaatgttaagtggacatgctaaatgggaactagtaagattgcctggcccacatagtgtagagtggaagacggagtgctggtaaggacgaattctccacttggtagacctttatggaccatttacaggggcttaggtcaaaagcctgtgagcacctcacaatgacaaatactgagactttggacaagagaatttctacttcagaggtatttactgccttgctatgtgatgttaactgaagctaccctaatggaaatggggtgcccaaaagagtcccatgttaaaatggaaacagtttataatggatttggcctcctggggaatgcaaggaggagatacttatggcaggaagcctcttttttccctaggactgtttctggaactgtgtgaagagctgccggattctatagtgcccaataaatagctctcgcctgactggcaaagaattgagtggcttgtaaatggcagttccaaggtgaacaaactacattctgtttggaagactgcaattctgattgaagatgagtcaagaaaaactttttattttgagctatttatatcttacaaaaattaagtaaagtatatttttgtgagcaaaatttactattctctttacctaagttccaaaatttggaaactatttgtgagtcttcttattttatatcaatacatttatttgcataagctcagccagaatatgttttcctttgttacgggacacaagtggagacattggttattttaccaaggctttcactgaaatgacatattttcagatatgaccagattttgtggagaaattgaggttgactttatacagctgataaaaagccccttggaaagactggcctgttacattgtctcaatggttcccttcaagatttctgacgtgtatgttaagtaaagattatcactttctaacaggccctggagcttcaagatatttggggacattgagaagaggggaatttgtacgggtgttataagcacagtctaatggtggatacttgggttggcttctggcctcaagacttttaaaagtcaaatctcaaattccttctaaaagttctaataaagccaccttaaaaggagcctatatggctgactactattcttgctatacctgatgcaaattataatgatactaaaatttattttgcaaataaattggtcctactatgatttattcttggtagaaatggggaacctgaagggagaaaaatttagaatctagctctgcccattgttttgagttttgattatttgcccacaatttgggctaaccctgaattattgcttggctacaggtagtctctaaaaaagaaacaggttttaattttcttcatgataatttcagttggttccttaatggaataggttctttgttgttgttgttctggcatacaaattttcttttgattgtaatccttgtgtacattatttttctgctattcaaattgttcatgttatgtgactctcattgttttacttctgtgaaaaccaaagtcatgatattgtgaagactagagatgattcaacagcctgtaaatctactgcatttggaatttcactggcctgattggttttccattgccagtgcactgctgcttaacctctaccatatcaagcacccttcctaaaggctcagggaccatcacagaagaggagggcatgtgagattgaaagaaccaaattggagtgtgggtggaggtggagcgtagaagccaaagggactccaacttggatgctaacccaacagattgtctttggattaaccctagctctgggaatacctctaagatttccagattatctattattccttgtgtaagagcacatacttaccataaatcctgcccttagtgcaaattcatacccattccctctgaagcccctgtacccctcctgtacagtctatatctgtggtctgagggggtaatggtgtgaagatccaccatcttgtcttgctgctgatcaagacacagacatggcttctattcctaagtccccagtaaatgtttctttctaaggaaaaaaaataaaataaatgttatgtttatctttttcttactgatttgacatataaatggaatcatacaatatgtagcatttttggtttagcttcttttacttatcaaaatgcatttgaggttcattcatgttgttttgtaaatcaacattttttttgtttgtttgaattttcagtggataagaactactcctttgtatcataatttggtcatgcatttaccagtggaaggacatgggtattgtttccaagctttgctagtggtaatagagctgctataatataaacctttgtgtgcacattttgtgtgaatgtaagttttcatttattttgggcaaatacctaggtgtgtgttagctggatcacctggtgagtgtatttaactttataagaaactgccaaatgttttttcagaaggttgtaccaatttacatttctaccagtaatgcatgagagttccagtacctttgcctaggtattgtcattttgttttttagtcattgtaagtggtgtcagtggtatctcaatgatgttttaacttaattttctctgatgactaatactattgagtatcttgtcctatatattttgagaatcttttcatatattgtttgctatctatttgggtaaagtttctattgacaaaatttgcctatttttaaacttgggcttttttattttttatttttcagttttgagagtcctttattcagaatacaagttatttgtaagaaacaggatttacaaatattttcttttagtctgtggcttgtcttctcattctctgaactgtgtcttttgcccagccaaagttactaattttaattattgttttattaattaatgtattttatttgtaaaaatttagtggctataagcacagttttgttacatggctatgttgtgtagtggtgaagtctgagcttttaatgtaaacaacacctgaagagtgtacattgtacccattaagtaatttctcattcctcaccaccccactctcttacccttccaagtctccagtgtctaatattccactctctatctccatgtgtacacactatttaactcccacttacaagtgaaaacctgtggtatttgacgttctgtttctgaatagtttcacataagataacggcctccagttccatccatgttgctgcaaaatacatgattttattattttctacaaatgaatagtattccatgatgtatatatattttagacatatatatcatatcatatgatatatcacatcatatgatatatgaggttcaattgattcacagttcagcatgggtggggaggcctcaggaaacttacaattatggcagaaggtgaaagggaagcagggcaccttcttcacagggtggtaggaagaagtgctccatatcatatcatatgatatatatgtctaaaatatatatacaccatggaatactacataacataaaatatatatacacctataatatgtattttatatattaagcatagtatataaaatatatatataatatgtggacataaagatatatatttatgtgtatatgttaaatatacattatatatacacataaataaatattacatgtgtatatatttacatgtgtatatataatatattttatattatatctcatatatatttaatatgtaatatatactattatatatataatatatactatataatttgtatatgtaatatgtaaatatgtatatatttatatgtgtatattatatattatatacacatctaagatatatatgtgtatattatatattatatacacatctaagatatatatgtatataatacataatatatttatatataattatatataataatacatatatactatgtatgcatataatatataatacatgcatataatatatcaaatataatatatgcatataatatatcaaatatatgtcataaatatatattttataatatataaatataaataatatatgatatatgtgtatacatatatacctaacataactcttctagatactgactgttttgtaggtatatacacactgtgtaaaaaaaaaaaaagtcaatatctacaagtgttttttaggtatgtgttaggtatacataccctggtatatctattcattcacgttttgtgatatgtatccagtcatcccttaatggagtcaggttccatagttttgctattgtgaatagtgctgctataaacacacaaatgcagccatctttttgatgtaacgatttcttaattatttcttttcctttgtgtagatacccagtagttagattgctgggttgaatgttaattctatgtttagttctttgagaaatctccattctgtttttcatagatgtacaaatttaaattcccatccacagcataagagcattcccttttctccatatcttcaccaacaactcttatttttgactttttaaaatagacactttaagtggtgtaattaaaatggtgatagcacattgccgttttaattttcatttctctgaattagtgacgttgagcattttttatatgttttttggccatttgtaggtattattttaagaaatatctgtttctgccctttgcctacttttaaatagggttgtttcttttgttttttgttgttgttgggttacttgagtttcttgcaggttctggatattagtcctttgaaggatgcatagtttgcaaatattttctctcattctgtgagttgtctattcactctgttgattatttattttgctgtgcagaatctttttagtttaattaagtcccatttgtctattttttattgcatttgcttttgaagtcttagtcatgaatcattttcctaggtcaatatctagaatagtttgtgtattactctgtcttcatactgctacaaagaactgcctgacattgggtaatttataaaggaggaggtttaattgattcacagttcagcatgagtgaggagatttcaggaaacttataattatgacagaaggtgaaagggaagcaaggtaccttcttcacagggcggtaggaagaagtgctgagcaaaggaggaaaaatcccttataaaaccatcagatatcctgagaactcactcactatcatgagaacatcatgggggaaaccacccctatgattcaattacctctacctggtctctcccttgacacgtgtagggattatgggattatggggattacaatccaagatgagatttgggtgcggttacaaagcctaatcatatcagtttgtataggttttcttctaatattttcataatttcaggttttacatttaaatatttaatctatcttgagttaattttgtataaggtgagagataggaattcagtttcatttttctgcatatggcaatccaattttcccagcaccatttattgaataggtctttccccagtgtatgtttttgttgactttatcaaatatcagatccatgtagtcaataagtatgtgcctttatttctgggttctctattctgttccatgcatctatgtgtctatttttataccagtaccatgatattttggttactatagctttgaagtataatttgaaatcaggtaatgtgatgccttcagatttgttctttttcataggattgctttagctatttaccctctttttttggttccatgtgaatagttgaattgtaatttctaattctgtgaaaaaatgtcattggcattttgacagaaattgcattgaatctgtagattcctttgggaggtatggtcattttaataacattaattattccaatccatgagcataggttgtttttccatttgtatgtgttccctataatttctttcatcagtggtttttgttcgtttgtttgttttttcttgtagagattgttcacttctttggttaagtttattcctaggtattttttatagctatcgtaaatgagattgacttcttgatttagttctcagcttgatcgttattggtgtataacaatgctactgacttttgtacattaatattgtatcctgaaactgtgctgaatttatttatcaactctaggagatttttggataaatctttagggtgttctaggtattagatcatataatcagcaatgagggacaatttgacttcccttccaatttggataccatttatttttttttctcttgcctgattgctcttgctaggacttccaggactatgttgaatgagtgtggaaagtaggcatccttctgttgttccagatcttagagggaatgctttcagctttcccctgtaaagtatgatgttggctgggggtttgttgtatatgacttttattgttttgaagtatgttgcttctatacatactttgttgagggtttcatgaagggatgctgaattttatcaaatgctttttccatatctattgagatgatcatgtggtttctgcctctattgagatgatcatatggtttttgtttttaattctgtttaaatggtgaatcacatttattgatttatgtaggttgaaccatccttgcatccttgggataaaacccacttgattttgttatattatctttttatgtactgttggatttgttttgctattttttttgaggatttttgcatatatgttcatcagggatatttgtctgtagttttcttttcttgttttgtccttgcttggtattagggtaatcatttggtgttaggctgatactggctttaaggaaaagttaggaaggattctctcctccattttttgaaagcgtttaaggaggattggtgccaattcttttttgtatgttttgtagaatttagctgtgaatccacctggtcctgggcttttgtgtgtgtgtgtgtttggagattttttattactgattcagtcttgccactcattgttggtctgttcaggttttccatttcttcctggttcagtcatgagaggttgcatgtttccaggaacttatctatttcctgtaggtttctcatgtgttagtgtatagttattcataagatctctgatgatattttgtatttctgtggtataagttataatgtctccatttttattttttattttgtttacttgggtcttgttattttagctagtgattatcaattttgtttatcttttcaaacaaccaacttcttgttttgttgatgatttttatttttattttggtttttatttcacttagttctgatacaaggtttgttatttattttcttgtgtcttttttctgtagttggtattctcattcattggtttatctatcattgcacaaatacctgtgtagttatttttaattgctccctttcctactagatgttaaattggtaaactcaaatttcttttgctcattatgtcagtattagcacttaggacaatgtcacagaatgaagttaatattttctaaatacataaagtaattaaaccttcgattataaaaatagacacgtttcacatttacatttttggtttatcttgttattctctaaggagcattatccagctttacctttttctaagtggctatttgccttgacaccatatgccaaataatctatcttttcctccagtaatttgaaatgtcattgtcaataaaagatggggtatactaaatgccccttttgtcttgggtctatgtttagactatattctctctattggtctttaacaggagaaattttaaattcaaagtagtataaactgtagagtctaatgttaacattttttagcactaaaaaatctaagcaactaatactttcatgtttaatgaaaaaatataatgtgtaaatacagaaaaatggattgtatttatttactctccattaattgttggcagaaatgatttacttgcaagtttgcaaataacttgttactatagcctgaaggactaattaaatgaaaaacttcaaaatcttcaaaatgaaaaacttcaaaatgcatctcattaccaaatattagtctaacaacattattttaagcaaaattattaaatattgtcaaaaaataaagtttcaactaaaatactgctatgatttgcataaaattgtgagtatttagcatgatattaaaaatatttattggtctgttttgtgtttatgtgcctttgtaagcaggtataatacctattgtgtttaatttgtgtgcttcaggaactaaggggaaaagtatgaatgtgtaattagaagacttacattttagcatcttgtcttagtttacaaatgggtgaaataataaaatcttctctgcctctttcacagggtatgtgaacatgcttgttaaaaagagtcccatttaattataacctatagctactacctgggcattttgagctcctgtgtccagcaagaaacaaacaagaaaactctcttttctgtaataaagataccacagctggcattgtcactgtgattggagatactatttgattgcgcttgcagtagtctgtaatcgtcattgagattgcatctggtttctgcagcatccacactagagaatcaaatggagacatgatggggacctctgcctctgcctcctttagatctttaatggtggcaccaatctttgccattctctgcttgccaggatgctatattgctttgagttcactattttgccttgggatggtcatgtttcaaggtttccactagacctccacatgatagtttttttcccacagaccatgattccactgtggggggtatgctaattttcaatgatactaattccaattttacatacatgaactggtgaaatgaccactgtaaactggatattgtctaggactccatttattacccgagtcctatgtgtcttcactttaattttgtggccatgatgatgtttcaggtctcagagtctcaatgtcaactcatatcctgtgtccaagaatttttaaaatgtttatgcatgttgcaccatctcttgggatccttgccagctgtcagattctttatatcaggagaatgcttcaaaatcaatgaactctctcttatcaaattgcatgttcttagcacctttgtttaagtatcctgaggatcctgttccataagcacttgcaagccaggttgtgcagctccttaggcatatagactctttcctgccatattagacccagcatgtttccagtttggttatgctatgatttaacctttaggtacaggcctacaggtagaggaaaagtctggaggaatgcatctgttcccttgtgagagagatgcctggcattgtcttcccacttggagggatgtagtgcccactcttattggggaaagctgaagcacttctgcaaacacagaagactcagaagagtctgggcagataaaatttttagaggcctccaccatgatattttcatttaggtttttctgatctaggtcctgaccttggcataacagacctgacttaattgtgtttaactttctttgaaattcagacactggccttattaagtcttaacttagatttatccatactcccattgcagatgagagctcaattgcgtgaaaacaaagagacccactggcatttgccagtgactttcaattgcttgttattggccatcatcagttcgttatatttctggagcacatcaatcatgcttcgcaataatattcaatattgttatttttagagctcctaatttcttaatgtcttttaatggacagctaattatattcttccacaaatgcaccatttccatttagcgctggtgaaaattttaaaaattggaccatcactttgtgctaaaggctgcctgtgctttacctgctaccagcaatggaggtgggggggggtcctcattatcagccaggtgtgagcaatttgcctccaaaatcccatcttaccaccattttaggtggttactcgtagtaatgactgctgtaggttgggttcaaaggaaacagccactagaattttgggtgcaaatgcttattatggattaacgcctgtgaaagaaaaagtggggtttggtagagggaaaagtcaaattgtgatgccggcttgacaaaaacaaacccaacgggaagctctagagttgacatttatacttttgcttcactcagtcatcatatgctgggttgacccagcaagaatatgatcttggcaggatggctttctgcaggtaaggcagatcattgaggtgcttacaggtggaagctgtctgttgactgtactccccacagctgtcaaacaaatttttccctgaagggaactagatggcgcatctctgtgtctcaatatgttcacatacaagcagagcaggccattactagacaatctctctagcacatttcatggtcagtattaaagtgacagaacttggttttgccaattttcacctttggtgaaatactcatggtaccactagacctcagattttctttttgtttgatggtttgtatatttgtttgctttttatctttaaaatggtagtgctttctggccaacacatatcctgatgagtgactatgataatcagaggaataaagctaattttaaacacacacacacacacacacacacacattgtaaatgacaaagccctataccaaagtaacatgttagtgctaatggctgttttccttttactgatttctagggctaggtatctagagcctttttcttcccctaacgttcttgtttgatgtcttgctctctgatttggaaccaaagttagacctgagaaatcaagttgggcctgacagggcagattataaggtctttatcatcctatcagatggtccttttcatgaacaagagaacatattcccttgaaactgaatattgggtaaaactattcatatttcccaaaatgagatatataggaagtaatggtggggccagccagtccatctccataactcagaaacacctggcacagttagcataatccatttgtgccaataaaatccagtgtgtcctgacacagaattcttccagctgtcataaagggacttgggtacctttggataccatatgctggcaataagtctagcctaatagccaagttcatggtcccctcattgcttttaagtcattcctaagcatcacaaggaccccctcaaaactaccatttagctgtcacacatgtcagcagaggcaagctaagggatgatgaataacaggaccaccaaaaataacacgggccaatatgttccctaccaactctttttctctgaaaatgcagatcttacacagcattaagtggtgaagataaaggcagtactgccagtgaaatgtcaccattagatgtgttttcttatccaagatacccacctacttgggtcacaagcccagggatgctagtcttcctgaagaggcaggtgacaggaaagatttaggaaagaacagcctgtcagtgagtgaagttagtgaagagaagccagactctcctatacaaccccttactcctacaagagattttaaatggcgtgatgtgggcctactgcccttgctggtggcagtataacatgacagattggcttgatattcctactcatgtcctacatttaatgcaggcgggggtgctttgtgacttttttttttaacctaaaatgcattttctccatttcttcaacctcatgatctccccaacatccctctgaccacatcttctaccattcaattccagccaccctagcctcttggttaatcctcaaatctaccaacctgctcctcttcctgggtcttcagtgttattgctccctcttgtttaaatgcttttctcctagatatttgcaagacttgctctctccttggcctgttaatgtatcagaaatgctgcctcctcttccattcctttctctgttttatttttctccatagcagttatcgccacttgattagtatgtatttattattaacttatctgttcatcccctctttgtcactagccctctgtttgagatgaaagctccatgagaacaggggttatgtctatttttgcactgctgtcacagaacaacaactcaaatattgttgaatattgaaggctatgcaacttcttcctcatgcccagttaaaatgtctttattttcccttaagccatctctcatctccaacctctatcctggtcttctcatgtctttcattggttctataataatttcttaagacatttgacacttcttcctagatcatgtgattgtaataaatatcaaagctattgacatttcatcttattatactataagcccctcaaagtgtgggctgtttaatgtaattctgaatcctctctagtacattgatctgtgcttattaagtatttggaagataggtgaatgtctgtagtgttaataatttaattcgtttgttcatttactcatttgcttaataaaagactggcaatcattgcgctaaatgctgcttctgtagtgaatgaagcagaaaccaaaccaaaccaaaccaaacaagaccatcagtaggccatcatgtaataagtacatatgttttaccaagtatttttcataggtcattgttacatatatttaatccttatgatagttcaaaatgatattattattccccatttaaaggatgggcaaaatagaaacacaaagatgttgagggtttttttttttcctcttggatttttatctctatctctccactatcaaatatgtcttaagcaatgtgccatgtattctggctttgtacaaaacctgatgtctaagaataataaccgctttaggatatttgatgattatgtttgcatgacactgacacaaatctgttgtgggcagaggatgattgctgataatgggataaatgtctctgtaaactctctctcagagcctgtgtaaagaggtccagcactgtggctcaaaggcaggggggctccttgattgaacactcaatgtttgtcccaaaacagatctttcctactgttttcggcacctgtcttggcttctgtggcttttgacgtcgatgacctataccagtggctccaccttggaggccactctcaggctactggaaccactttgtccctcaagtataaaaagtgggcagtgcctgggaatttatacctcaccctactcatttctaagggtgatccttagccaatgaatacctatgggtgaggaggtttaaaagcccagctctttgccttaggttgcaatagtgctgagacataatttatacttccatacttccagggtctctctgttagatcagattgagtttcagctctgaaagctttgtgtgaaattgcactgttgcttccttttgctttttgctttccttacttactagtttttcctcaaacttatttaataaatcacttgcatacaaatccttatctcagggtctccttttgaggaatccaactgaagatcgttgcctagtaggaagcattagttaaaatgttcttcatgggaaaggaattgtgccttctatatgaaagctactctgcccttttggaggaagctgcttgcctctgggttagagctggtccttcagggtatttcatggctatctcttagacagatagtggttctactctaacctagattggaaataaaacaaatggaaactgtttctttagactgtatattgtatgtggttgcccaaaacacacaggcacacagacatacacacacactcatgatcaaatgaaatgaaatcaggctgggcgtggtggctcatgcctgtaatcccagcactgtgagaggctgaggcaggtggatcacaaggtcgggagatcaagaccatcctgactaacatggtgaaatcctgtctctactaaaaatacaaaaattagccaggtgtggtgcatgcctgtagtctcagctactcaggaagctgaggcaggagaatcgcttgaacccaggagatggaggttgcagtgagccaagatcacgccaccgcactccagccagggcaagagagcaagactccatctcaaaaaataaataaataaataaataaataaataaataaataaataaaatcaataagtatagagaaatttatttgaactctattcattactggacattcatcactttccacggattctactaaagacctaggatataaaagtaacataatttctacctttgggaaactaacaatgtgtggggcaaaatagggacgtgatcaataaaaacacaggacagctgggtaagtgctacagtaaaggctggtatcaggtgctgagggaccagaaaagggagctatgcatttgggtagggagaaaaaactaggacagtttcactgaaaaggagatatttgagctggtttctgaaggagagaaaaaattaccacaaataaaggagagtattgccctgatagaatactgagagtgaagaagcataatttattgaggaattcatttatatcttatttatgttttgtacctcaccccccacaacaattgtttctatttctaataaatcaagcaatcaatcaacctacagggaagttggaggtctgcaaacctccttggcttggataatgagcacatcaacagagactagcagtgaccagtatggaggacattagaggagtctctctgaatgctctgcttaacataaaattttaaagaactgcaggaggaggagttgggtggagtgacagcccacaatgactgagtgaatttgccttcaacctggcaacatgggtgcaaagtcagatttattttaatttaaagagcacaaagaagaaggatatttcttctgtatctgagcttgcgaagtaaaataattattgctggtctgttgaacgtgggaaactatgagtagtttccttgctcaagtgtaggatgcaaggggagaggagagccgaggccaggatgagaagctgagatgtgcactgattgagagccattaaatatctttaactagaacaataacaggatcatgctgctgcttgggagggagtaaagattgagtggaaggcccctacctgtgggttgcagtgataggcactaataatgaagaaggcagcggtctatccttgctcaagggtttcccattcctctggagaaatgagacttgctctaaaaaagtattaatagctagttgcacaactaatgctataggaaaaagtggttgtcagaggctactcacttagctcctgttttgttttctacccttttgttccactgagtcggaagatcaattaagatcgtcagccttgacggctcagactgagctgtttggtaaggacttgaatagagtcacattttccacttcttgatctttctagacatttgatggcaaaaccattacctgttgaattccatatgcttttccattccctcatgatttgccagaatctattactgacaacctgaccagacagcacagttgaataagtcatgaatagacacttggctcccacccagtcacatttcctgcctcctaggtcaggtcagtcctatagactggatctttacctctccatgtccatagactgttatattttctagagtagttttccagttttctagagttggggttcacaacataacctccaaatacttggttggcattctaatgcccaccttaacccccacctgactgctagattctgtattctgtgttcttagcatgtttcccagtatcctgacacaagtggcaaatcactcataagacacactaatcaggatacttgactcctaaatttgtgaggctgccttgatctttggactgtcctcttgatataatgtctcagtactgacctcctctggcatcctgagaccgccatactgccatactcactttccctagatccatgtcccaaagcctcctctataactgagaagacttcttagaccctgatagtttcaaatcttgtttattgcccctccaacaacttaagaatgtggaaaggatctaagtagtaactggtgaggtacatgactgggattatggagaaggaatcaaaagaaaaagatggagagaagagatcacctagacatcactgcacagttgagattcccagtcactattcactgatttttgattttcatttgatctcagcacatacacacaacaagactctagccttcccaggagatgaggttctgaaagctttgacaaagttctctttatgtgataggagatggctctgctgtgggactctcacatttcatggtgacaggatgaaaagtggcacttgcgagggtggatgctgagcaagagaatgatttagagcatctctgtgatgatgttttgccattttaaaatagtttaatgctggttctttagagcagtaattttctaacctcttaaaaattctgcattgaacctcttctgtcaaaggaaatcttatgtagaaaactaatacagaaaacatacaaaacagaactgctcagagtgaagcagttgtgtcatgcctgaaccctggccaaaggcttttattcccaactctccagctatggtgcacccaaggcttgcaaagccttcagtatgatagccacagagcagaggagacaagctggcatcctaaaaactggatcttaaaaacataaatgtgtgtggtttggatcctagaacattttacaaagactggagtcaatatttaatcaatgacctaattcatattaaaatttcaattttctatcttgtgttgcatattttaaagttcattcaatataaagtgtgaattctcatgtaataatattatttcagaaaagaattgcagtatataagtcagatgtgttagtgaggttcattagggaaacagaatcaacagaatatattgtttgttctcagatcactttgttaagatagtgtgtatatagatatacacataatttatatataatatatttaatttttatacatatatgaataatatattttcatatatattctctctctatattacatatatgtatatatatattatatatatatgtacagagagagagagagaatatatatatagagagagagagaaagagagaagggaggagggagagacaaagagagagagttgcagtttgagtttgatggcagtctactggcagaattctccccgcctcatctgggttggtcagtcttttctctattaaagcccttaacagattgaacaaagcccaaccacattatagggtaatctgcttaacttaaagtttactgacttaaggctaatcttatctaaaacatgccttcacagacatatctaggataatgtttgactaaatatctgagtaccatgacctaatcaagttgatacatgaaatttacaatcacagacagccatccctttaatttagttattttaaaaagcatgttattgacttaaaaaatctctctttggttttttaagtattgtgataattataaatatacagaaaacctggaagtacagtacaaagaattttattctctctgaatgaatatagaataggctgccaagttgatgtcccatttctcttaaatactttgggaggcattttgtgcaaacaaggccattctcctacagggtctcaacccaactatcagaatcagaaaattatattatcatgttatatccaaccctcagacctcattcacatttggcaaatatctccattatgttctatatggtagaggaatcctgttcagaatgaggcactgcattcaattgttgtgtctctttagtccagggtctggaacagtttttcttactctttccttaattattgtaaccttgacacttttgaagattacaggcagattattttatagaatatcccttaatttgggtttgtccagtgtttcaaatggttagatttagttcacacatttttggtaggcttattcctttcattgcaccctttaaagtagtgctcaatttttgtttgtcctattactgttaatgttaaattagatcagttagttaaggtagtaccttctgggctgctccaatgtaaattcactcttttccaatttataattactaaggagtttatagggagacactttgaaattatgtaaatatcttgttcttcatcgaactttcaacttattaactatttatagacttatttcatattttattaaattggatataatccaatactatcattattcattcttacatcatcctctcttaggccagctggccttcatgtccttttgacatgttcccattacttcttaaacacttccctgaatttctggtacaaaacaatactctgtgtttatcatgtacttactctactccagtgctggaatcatctattgtttaaggtgttcttgttccatttagagaagaaaccacaatcttgaattaggtgtactcactgctattgaattatcatttttcccaggccctgtcagtggatagaggtagagaatgaataaataagcaacttacacacacgtatttctctatctctatatatttaaaaccatgggcaaacaccaacgttgccatttatttttttcatttttttttttttttttttgagacagaatctcagtctgttgcccaggctgtagtgcaatagtgcaatctcgtctcactgcaacctccgcctcctgggttcaagcaattcctgtgcctcagtttttgagtagctgagattacaggtgtgcgccatcacatctggctaattgtttttgtatttttagtagagacagggtttcactatgttggccagtctggtcttgaactcctgacctcaggtgatctgcccacttcggcctcccaaagtgctgagattacaggcatgagccaccaccacgcctggcctaatgtcactatttctaattcacccccataggatgcattatagtttgcccatctttcatatttgtaccacaactacaccatgactttgaaatactatcaaacaaactccactgatgttcaagacagcgtgcattctgccacagtctcagtggatgtctagagctcttttttttttttgatcagtaaatacaatagtcaaaataaggcttctttagggaggtcaggagtaattcctgggcattaagtttaagaaatgtttaatttggtagttccaggttactattattgtatgaaataaagcagtgaccagctagttgaaaagagctcatgtttcaaacaaatacatgtcaatactgtctaatggtactgggaacaaaaacaataataatactacatattttaatacactatctacaatgtgtcagatactaagtgctttataaagattttcatatttgatcctgataataaacttgagagagagatattattattccaatttacagaaaaggaactaaaagtcagaggaaagagataaaatatatgacttctattgcattttatttatcttattaaaaacatccttattaatcttattaaacatatctattgcatttattatcttatttaataaaatgcataaactgcttctttgtctacttaaagcttctagaaagagtcggttactcagaggatctagcactgggaatcaattaactcacaaaacataatggttcctaaaaatacctttgaagacagatacaaatgggttcaaaatttggttttaccacttgtcagctataagtagacaaggaagcaactgattatgccacaattaatggcaattcaggaatctgtaaaattgaccaagaggagactggccttctctaacccggatgtgtgtgtgtatgtgtttgtgcatttctatcagccaccaggaaaagtgaatcaatggggattcagacattcatttatgactatagtgaccactgagtcagtagatctcttttacacatcacccaccccattataaagtttaattctctgttagtgacattaaatccttcttgatctctcttctctcttgtggtctcaaggagaaattttcagtctcttaatctttttcaattttgcactcaaaaacacatgttgctgagacatgatcttttatttctactgtttcaatattacaatatgatatactatatcatggacagaaccatcaagggacatttcctacacatatttaggacctaacaattcctccttatagcctagtagttgagatgtggaccctggaattggattgccaggttttgactttttctaccctactttctagcttgggcaagttattaacctgtctattcctcatttttttcaactttaaaatgggggaaatatctgtcacttagaattaatatgattaattaaatgaattactattccaaataacttagaacactcccaggctctgaataaatgtaactatattatttttactattaaatccaacagcaacagtaaatatcattattgtttatttcaaataataaagttccctccttgttagaagtcctctctgtgttgggattttaattctaagaggaaggattttgttccaattaaaaccattttttgaaatcctcaagaaattgttcattggacatctgcatttatttcaaatctgttctatcaatatattctgaataattcatgtaatcgaataataaaggcatacgttgattcatgtatactaaaaatcaaggatcaatatttataatttgaacttttttggtttgttccactttagttgtagagttcaaataattttgagctttgttacaaaatttgtttccaaagctagcttccaacatatttaaaatatgttttttgtatgcatacacatgctcatttcaattgcatccaactgaattaaatggcactaacagttgcatagtgctcacaatatatcaggcactgcaccaatcattccatatttgttatcttatttagtcctagtcacaactgaaagagatgtttataaatatcttcatttcgtggatgaggatattgagattccgagtagttaagtaacttgcttgatgccatatggctggtaagaggagcaacgggcatttaaagctcagtcctctttactcaggcttgcgctcttgaaccacagcacactagctcaaatctctaaatatgcaactccaggtagcagcctgtaggtgggagagttcattcttgggatggagagccattctcctgacactgaaattgtgacatcaaagtctatcacctattttagttacagacaaagcttctaccctgaccacttggtggatgaaggagaaaaagaagattgctatggggactttaggagtttcaaaatgtgagaaggataggatggtgaagttatttattttcagctttgatagaaacacaggaaggatgatgatggagagaagaattatgataacacaaactatcttttcctcaaacttggtggtgtcactgatattcattcttgccattattttgaaaaataacataattttagggaaaaaggaaacactgaaatatgcatattgactgtaacaagcatcatgatttcagaaatattaaagtgtgaattctagaatgcagtgattaataaaaatctcccggtttttccttaatactttacaaggtcattggggataaggataatgatgatcaaatgaattcactgactgtagatctgtgacattactagaggtcatttagctatgcttttgttaagaactggttcccagccaggcatagtggctcatccctgtaaccccagcactttaaggggctgaggcagatggaacacttgaggtcaggagttcgggaccagcctgaccaacatggaaaaacactgtctctactaaaaacacaaaaattagccaggtgtgttggtgcacgactgtaattccagctacttgggaggctgaggcacgagaattgcttgaacccaggaagcggagtttgtagtgagccaagatcacgccactgcactccggcctgggtgacaaagtaagaccctgtctcaaaaacaaaaacaaacaaaaaaactggttcccaagttctgtttggttgaggatcttatgaaaaatgcttttgcacttattttaccattgaatacaaagacaactaaggagatcacatctaagaatgtcatggaagtacaaatatttgcaatcactgaatccgccattatctcctacacataaagcaatactatatgaattttactcactgcttaaaaattccttctccatcagactcccaaaactatttagagcagtgtgaaaagttttacaaactgatccataatacataacagcctcacacattctccaggaagacagcatgtgtgtggagaaagaaggctttctttagattcagagaggatcacgtttaaaatatagcttctcctcttactagccatcaacctttggaaccttcagggtcttaagttctctaagcttctaggtctagaataggagaaaaaaaaacctcaaggattacttcaaagaataaagaaaattatgtatgtaaagctctttatctgtattaggtatttaacaaaataataataataaattattacatactgcttaccatggcaaagacaattttctaagcactttacatgttaacttatttgcctttcataaaacgttgtgaagggaaaattgtcattcccattttaaattcttatatttctttttctttttttctttcttttttctttttcttttttttttttttttttttgaggtacagtctccgtcgccaggctggagtgcagtggagcgatctcggctcactgtgacctccgactccctggttcaagcgattctcctgcctcagcctctctagtagctggtattacaggcatgatccaccacgcccagctaatttttgtatttttagtagaaagggggtttcaccatgttggccaggatggtctccatctcctgacctcatgatctgcctgcgtcggcctctcaaagtgttggaattacaggcgtgagccaccgcacccggcccattcttatgtttctttaaagccttttacttcaaaataattttacatttacagaaaagtggaaaggatagtacatagaattctcacataccatttacccagcttccctcatgttaccatcttacataacaatgatgcatttatgacaactaagaaattaatgttgatacaatgctgttaattaaaatgcaaactttatttggatcttcctagttgttatgcttatgttcttttctgtctcaggattcaattgaggataccacattgcattctgttttcatgtctctttagtcttatatttgtgatgtgtcttggtctctccttgcccttcatgatcttggcactttcggagtaatggtcagatattttattgaatgtccctcaatttgagttcctctcatgttatctcatgattttggattgggaggaagaaaatcacagaggcgatgtgcctttcctgttacattgtaaatatatatccatgcatccttactttaataaataaatgattaaatgaataagctactgggaaagaagtgacaaatcttctgtatggaataattccaattaataaatttataaggaatgagagaaatagaagtcaccattataacactacagtaataattgctgcatgttagatctattgatgcatgctaaaattagtgtgcaaagctttaaggaaaaacagagatatttgcatagcctcaaagtatctcccagatatagtttgagtttatgtccccacaaaatctgaggttgcactgtaatccccaatgttggaggtgaggcctgaggggaggagtttgggtcatgggggaggatccctcatggattggtgctgtccttagtgagtttagatagtgacttttcactcagatagtgagttctcccaagatctggttgttgtaaagtgtggcactccttcccactctctctcttgctcctgcttatgccatgtgacatgcaagctcctgctttgccttcctaagcaaaaacttcctaaggcctccccagaaacagatgccggtgctatgcctcctgtacaaactgcagaactatgagccaattaaacctcttgtaaattaaccagtctaaggcatttccttatatcattgcaaggaacagcctaatacatgccccaaaatattaattcctgtgatggttttaatatattctgacagatcatttatagtctttttttttttctagggaatggtaattttcctacctttaaatgtgggctagactggcgactctcttcttcttcttctttttttttttttttgagatggagtctcgctctgtcacccaggctgaagtgcagtggcatgatcttggctcactgcaagctcccaggttcatgccattctcctgcctcagcctcctgagtagctgggactacaggtgcccacgaccacacccgtctaatttttggtatttttagtagagacggggtttcaccgtgttagccaggatggcaactctcttcttatgactagagtatggaaaggcaaaattagtgattttatagtgaagaaatcttgcagacaccaccgtaagcaatatcaccaatgatagtcatagtgagactacatatagttagttctgctgtaataagacacaggcatttcttaaaatgaccatgctacacaaaatcacatagtaaaaaccacagggcttgcggaaaaaatggaatcgaggcacaacacccaaaaatttcataggtgacacatgaaaacaaaagctaggaaactaataaaaatcgtagcatcattgttcacatgttaaatggttaagaaatgcataaatgctacaataattagggtactttccttaaagaagatctgaagtttgcccatagaaatggacgttagaagagctgcagctcctgaattattttgaagtggtggaacaagtgttaactgaaataagacagaaagttgtaagaccagatgtggatggatatggctcataacacaagatgaactgaagcaggtgtagatatttgagatctgtgtgtatgtgttttgtgtatttttccttggctaggttcaaccaggtggaggtttctgccttcacttaatatttgtcccatagaaaatcatgcataagcaaatataacattttcagtttgcttaaattatttcctaatacatcatttgcattggaacaaattcatgttttcacaacaagtgttatagcaaatctgattacaagttgaatctgaatgaatctgccttactttattttgataatataacatctatttttcttgataaagatttggaaaaaagagaatcttagagtgtcactggaatcagccaaaatacttcaaagagtacaataatgtccatcaacagggaagaatcatgatattagttgatatgtccactaccatatttgtcttagcacttttgctgaacattattcttatcattactatattttagacacagggtcttgctctgttgctcaggttggagtgcagtggtgcaatcacagctcactgcagccttgaactcctaggctcatgcaatcctgtcacttcagcctccctgccctgagtggctgggattatgggtgcaggccatcacatgtgggtaattaaatttatttttgtagatgcaggatttcttcattttgcctaggcattttatgcccacagttactctttcagggctatcaactgaacatgcagagaaatggtagcagagtaatctttctctgcaacatggtacagtctgtttgataaatatctaccaggaaaagtgaatatttctgcctgagaaaaatgaaagaaaagaggaaaaatattactgaatttgtacctaaaagaacatgcaatgtataaatggagttttgtgaagaatttatgtgatagagtgtgtaagatgattcactgttatgtagttaagagtcattaatacagacactgcaggctagcacattaattttcaaaactgtctagaaatagaattttattaaatacaaaggaaagcagtagacatttaaccttttttaagttttgatttctgtaccagacctctgagagattcctttctctctcttctagctgatttcaatagtcctgtcttttctctgggcttttgacaagtgatgagacccactattcttgacagtcctcaagcttggattttactgaacaaagtaaggttttagccaaacaagtggatttcatatttagaactacctctggtagtgatagaactttaaggaacagagagtataattgtgcttctagcaccctatatccatccctttaatacttcagaattcctctgaaaacaaaaaaggggaaaaaaagaagaaaacatatttccttccagctttaagtcacagcccatctttgcattgactggatagcatttttttttttaaagcatgtgacttctctcttagggagagagacagcgagagttatcagcatcttggacaaaaggtgtgatttcaaagaacaggctaaatggagagaggcacagacctgctgtctcattccacaatttgaactgtaccatgaaaaagatcactggacaagtatgctcattaaaacattattcgttatagaaaaaaagtctcataaaatctggaagcaaatgaatgtcaattaagagattatttttatcgaatggaaatatgaatcagcttaaaattgtgcatttcgttacacagaaagaactttgtaacatattatggaaggaagaaaggggacacagaagagtcttcagatcaataggcatgtgtgtgcacgcacatgtatgtacacataaatgcttgaacagtttttcactaaactattgatgggagctaattctgattggtggtatttctagtaatctattttgatttactgtagtatattttgacttcctttttaaaaggaaatacacatatttctagaataagaataaaatagaattttcttagaggatacaaaagacattcatgtactggtcttcatgaaagcatactaaatacatgatagaaaatatattaaggaataaaagtttattggcaatgataacaagaagcagctaaaaccagaggtcctaagctatgaaaaatagctgcaatacagtgacttttctcttcaataaggcggatggcaaaagtgtattcagacctcttcagatttcaaacaagatgcatacagctctgaaagtaaaactttcctgggaggtcaaatgggtaagtatcttctggaaataatgtagggtgcaagcagcccgtgaattttcaagagtatgccagacactgttctagtgttttttgcatattagtgaatttaatccttgtccagcccaataaggcttatactactagtgcacccattttacaggtgaaataacatctgtgaggcacagtagagtgagacaacttgctcatgggacatatgtgaaactacaatcaactgaggcagtctggttcctcataatcataatatgaacctcagatcatcataataagtagggaataccttttgggaggctaaaaccacatttcagactgctggagaggcagggtttcacgaggggttttgtaggatggcacctttgttttatcagaagtggatttattgtacaaaagatgagagatggccatactattggtagctcctgaatggtggtaactgagcagaagtaaataggcattgtagcattaaaaattctcatgagtggccgggcgcagtggctcatgcctgtaatcccagcactttgggaggccgaggcgggcggatcacggggtcaggagatcgagaccatcctggcttacacggtgaaacccagtctctactaaaaatacaaaaaaaaattagccaggtgtggtggcgggagcctctagtcccagctactcgggaggctaaggcaggagaatggcgtgaacccaggaggcggagcttgcagtgagcagtgatcgcgcctctgcactccagcctgggcgacagagcaagactccgtctcaaaaaaaaaaaaaaaaaaaaaaaaaaaaaaaaaaaaattctcatgagctacagaaattcactaattcatctcctccgtgactgatatgatgattaaaatatccttttcctgattgatatgataacccccaaagaaggaattcaacactgagagggagtgtgctcacaccagagacagcatttgtttgggtagggtagtattttaagacaagaaatcagaaatgaggggctacccgtcctgataaaccttagtgtcccctactcttgagaaaaactggcaggtcatgaataaactactctcattcagaaaacaaaaaatcccagcttgggattgtacttggatgagagaaaacaaacacaccatcaaaagctaaataacgtcataaagatgagaactaaaacttaaaagagaaataaaaaaatacatttaaaaataattatttaattaataaaatgatattttattttattttttaagagttggggcctcactcagcccaggcttaagtgtagtggcattatcatagctcactgcaacttcaaatttataggctccagcagtcctcctgcctgtctcccaagtagctaagactagaggtgcatgctaccacacccagctaattttacttatttatttatttattttgtagagaagatgtcttactatgttgaccaggctgggcttgaactcttggcctcaaccagtctcctgccttggcctcccaaagtgccaggattgtaggggtgagccactatacctggctacaaaagaatattttagataaccactctcttatgctctcaagcaattaaaggaatataaacttttcaagaattataaacaatcacagaaaagttaatatagctacagaaagagaataaaagtgagatgacaaatgtcagaaaagacagaaatgtacatatatgacaaccacacaataatgcagaaggaacttgaatagatattaataaaacacgggcgtggtgaattggattgttaaagttattcagatcagagggtaaggataacagcaattagagagaagcagaaatatttggaggctacaaagaatacatccagtatatgcataattggcatcctctgattaaatagaggaaataacacaacacatacatttcatatggaacagaaaaaatagtcagaaatacaacacaaggaaattttcctaaaatgaagaaagccataaatacatagattgaaagaacactacctgaatacaagggaaaaactgctaaagaatatatctaccactgctaaagaagtatgtcctttgcagggacatggatgaagctggaaaccatcactctcagcaaactaacacagcaacagaaagccaaacaccacatgttctcactcataagtgggagttgaacaatgagaacacatggacacagggaggggaacatcacacaccggggcctgtcggggggttggggggctaagggagggatagcattaggagaaatacctaatgtagatgacgggttgatgggtgcagcaaaccaccatggcacgtgtatacctatgtaacaaacctgcccgttctgcacatgtagaatttaaagtataatttttttaagaaagaagtatcattgtaacatcaccctgatgaaattactataatttcatcacataaaaattaacaatattgttatctaggcagaaaagaaatatatgaaaaaaagcattgatttcccaattatcctcaacaatactgcaacagcagagtacattagaactgtatttcataattatgagaagaaagtgaatacataaggttcctacccagctaagttattgttcttataagatgtatagaaaagtaatgtctgtaacttcagaacttagagaaaaattggccgggcgcggtggctcatgcctgtaatcccagcactttgggaggcttaggcaagcagatcacgaggtcaggagatcgagaccacggtgaaacccggtctctactaaaaatacaaaaaattagctgggcgtggtggcgggcgcctgtagtcccagctacttgggaggctgaggcaggagaatggcatgaacctggaaggcggagcttgcagtgagccgagatcgcgccactgcactccagcctgggggacagagccagacttcgtcaaaaaaaaaaaaaaaaaaaaaaaaagaacttagagaaaaattgcactcaaatggattgattggataaatattttattgatatctagccaattagaagtgggagaaagagaaagatgtggaggagatggaagaggaggagcaggagaaagagtaaaagaagaaacaaaatgaaaactcagaaatttcgaagctgaactataaaagaagtagtagaggtcactgaaagcaagtaaataaagaaattagaattcaaatctatattaaatggtttatagaatataatgcaaatgatataaaatttgacaatgtaatattactacaactaatcaatatcaaagacagaaatatataaggagaagacatttgaagtataataacgtttttatttttagggcaaaatatcagtagatgttgaagttgttaaattcataaatcgaatttaggtttgttattttgaagttataaggtgttaaaatgtggccactggaagggctttaatttcaattcacaatgttggaattaccaaaagggggaaaaagcagaatacagcaaaaaagaaacacagatcataaagcaaacatttaaagccaaagacacataaaaagaaaaagtaagtaactgaaaattaaatggaaaagtatttttctcaatatgtcttgaggtcgagtgaatcaaaatttttttaaacattcaggaccttaaatacttacattaccgtaatggattttgtcagtgatagacccaggattctcccttcttattagaaactaactttttctcaagtatttacccctcagacccacagttctgtttctcagaacaagctaaagattggcctgatggatccaatgaaactctcaccttcttgccagtgactgattgaggaatagctattaaactaatttgggctaacaatatggcaggcggaggcataacagacttctgagaaagttctgccttcttgagtgagccaaagaataccagttgtgaatgaggaaacgtggagctctaattgctactgacacaggggaatctccttagaatatagtctttgctaggccgggcgcggtggctcacgcctataatcccagcactttgggaggccgagacggacggatcacgaggtcaggagatggagaccgtcctggctaacacggtgaaaccccgtctctactaaaaaaatacaaaaaaattagccaggcgtggtggcaggcgcctgtagtcccagctactccggagactgagaaacgagaatggcgggaacccgggaggcagaggttgcagtgagcggagatcgcaccactgcactccagcctgggcgacagagtgagactccgtctcaaaaaaaaaaaaaaaagaaaaaaaaagaatacagcctctgctagagatcacagcctggagatacgtgacaaacctagggccttgaaaacattacggagctcccaataaatcaaccttgacgtccatcctacctataaacttcctcttaggtgagctaatacagcttcttttcaattagtggtggttttcatttgttcgtttttacatatagctttgtgcatctgattgatagaattagtaaacgagaaagaataacatacattcattaggcaattcaatcgttctccaaacatttactgaatactcactatgtgctatgcatggaaataggttaggttagtaaatatgcaccaaatgtatacacgtacacatatacaaacatttaaatgacataagtacacacacatacatagaaatacagaggcgaggtaagagacaagaagaaagataggaaagatttcaaaggagagatgtcaaaacgctgacaatgtgtaacatttcataccgattgaattctttacaagcatgtattactttaacaacaaaatgatcttaaaaatttttaaagattaaaaaaatctattttcattttggcaacaaagaaattcctgctgtcttcagtatgtgcccttacaaaaaatgtcaacattgtgtctttggctataatccactggtgagaagacctcagcaggaatacagcagatttctgtagtcttgctggggttagatttcctatttcatcatctgaaaaaaatcatagaacaaaatgcttcaatagcccaggctttctggaacattcatatatgcagaataaagagactaagccttattttaaaaaagaaaaagaaaaagcccatccaaagatgcacattctgccgagctatagctctataggcacacacattgtaccggtataaaataaagatcttgcttgtcaaggacaacacattttaatggcttgggaattaaaatctggtttcagcaacccctttgccccattgtagtaaattaaatttaatgctgacaggagtaatgcacattagactccagagcataaatttaagcaccaaattaatgcaactggactgaaatgaagggtcctggaagaacattaggggaagaacagactcctttaatgattgttcttttcaaaatggggaaagtcggttctaagaagcagaaaggcaaaactatctgcagtctcagaagcctctgggattactggcgctggtttgtatgtctctgttgagcttctattagcagtatttcatccactcactctcctctcatttcatgaatatctcatcagttcttttggctgtagcaacaccattttaggagaagagtaaactattaatgaaagggcagtgagaacttgtattgaaaggttaaagggaaagtggaaggaaaatatatccttaatgaaattgaacgtattcacttttggccgggcgcagtggctcacgcctatagtcccagcactttgggaggccgaggcaggtggatgacctgaggtcaagagtttgagcctagcctggccaacgtggtgaaatcttgtctctactaaaaatacaaaaaaaagagaaaaaaaaaattagcctggtgtcgtggggggtgcctatagtcccagctactcggggaggctgaggcaggagaaatgcttgaacccaggaggcggaggttgctgtgagctaagatcgcgccgctgctctccagcctgggtgacagagggagagtctatctcaaaaagaaaaaaagaaagaaagtactcactttctttttctgtattacaaatataagcagtttttataatgactgatttaattttcagaacaaatgcagatcccagatttgtaggagttaaaaactctaccaaaatttttttttgttttgagacacagtctcgctctgtcacccaggctgtagtgcagtggtgccatctcggctcactgcaacctccgcctcctgggttcaagtgattctcctgcctcagcctcccgagtagctggggatacagccaccacgcccagctaattttgttttttttttttgtttttttttttagtagagatggggtttcaccatgttggccaggcttgtctccatcttttgacctcatgatccacccacctcggcctcccaaagtgctaggattacaggcgtgagccacggctcgaagcctctacaaaaacttctagttaataatcacagtagtcagaagtggaaatgattttttcctatcctattgcaagattgcctccattttatagttgatattcttctgatagcaatttatttctttttctttactagtaggaacccaatttgtttaggtaactatctctcttgttttccggagtaggtgagccagtgtctcagaaacaactaaactatatttgtgtaagctgataacaatggtcctgttccccccagccagtgattggtttagatatgagcaggaaacttaattctggtcaacaacttgcaagatgaagtgtgctgaagagcttacggaaaaggttgtcgtactccttagaaataaacaggaagaagtatctattgttgaatattgcagcctctgcacatagtgcttagaattctggtgcctgtccagggaccatgaagaggagtagtccagagtccctgtacttgataataatgttggcatgctgctagaactgctgtcctccagactccctgatatgaaagataaaacatccccgtgttgtttaaatgtttttaagttttattgttttttcctgatacttggagccaaaataatcctaatcaataaactgaatcatggaccagagctttattcagtcacttagccaaccattttgatttccttctatgtgtcagctggtatgtttggtgctaggaatataatagcgccagggacacaagacggatatggtctctccctcacaaagcctatggcttagtgaggattcaagacttcaaaaaaataatcagttgatagatgcactgaaggccctgacttcaccacaatgcaatatatcaacgtaggaaaattgcacttgtgtcccatgaatatatataagtggtcattagagaaatgaaaatcaaaaccgcaatgagatacatctcacaccagctggaatggcaatcattaaaaagtcaggaaacaacagatgctggagaagatgtggagaaataggaatgcttttacactgtttttgggagtgtaaattaattcaaccgttgtggaagacagtgtggtgattcctcaaggatctagaaccacaaataccatttgacccagcaatcccattactggttatatacccaaaggattataaatcattctactatgaaaacacatgcacctatatgtttattgcagcactattcacaatagcaaagacttggaaccaacccaaatgcccatcaatgatagaatggataaagaaaatgtggcccatatacaccatggaatactatgcagccataaaaaaggatgagttcatatcctttgcaggaacacggatgaagatcgaaaccatcattctcggcaaactaacacagcaacagaaaaccaaccaccacatgttctcactcataagtggaggttgaataatgaaaacacatggacacagggaggggaacatcacacaccagggcctgttagggtgtggggggctaggggagggatagcattaggagaaatatctaatgtagatgacgggttgatgggtgcagcaaaccactatggcacgtgtatacctgtgtaacaaacctgcacgttctgcacatgtattccagaacttaaagtataatttaaaaaaggtaaaaaaaattagttaaagagtaagtataagaaataaaaggaaaagccaatgtctctctctgtatctctctctctttctcttcttggagacagaatctcactctgttgcccaggctggagtgcagcagtacaaccatggctcactgcagtctcaacctcctaggctcaagtgatcctcccacctcagacccccaagtagctggaactacaggcatgcaccaccattcctggctaatttaattttttttttttttttttgtagagacagggtctcactgtgttgcccaggttaatcttgaactcctgggctcaagcaatcctcccaccctgacttccaaagtatatatcatttttaaagtaagtaaatatagaattggtgaacagattagttattcccaaggattacaggtaaggttttggtaggcatagctataaaggaataacacggaggaattcttgtgatgatggaacaattttttatgttgattgtggtaagagttacatgaatctacatacataataaaattacacagaactacacacacacacatgcatgtacacatacatacatacaaatgataacatgcaattctggggctatataagctctgtggattgtaccatgtcaaacccctaatattctttagcacaggatattgtactagctatgcaaggtgttaccattaaagataaggggccaaaggtacatgagaccttcctgcacattttttacaacttcctatgaatccagaattatttcaaaaatgaaatttagaaagttaataataataataaggaatttattgttagaatagcaaattgaacaaatacatctaatttctaatttctaatcttccaaaagccaccactaaaactaccggaaagattattattattttttttttttgagacacagtcttgctcttgtcactcaggctggagtgcagtggcgtgatcctggctcactgcaacctctgtctcctgggttcaagcaattctcctacctcagcctcccgagtagctgggattacaggtgcctgccaccacacgccactaatttttgcatttttagtagagatggggtttcaccacattggccaggctggtcttgaactcctgacctcaggtgatccacccacctgggcctcccaaagtgctaggattacaggcatgagccaccgcacccagccactactggaaagatttttatccccccttgagactttaaaaaagtacagcaaaaacaagagagaagacacaacacattgacggtatttttgaacctggaaagcaaacaaaccagttaaaatgggctaaatataccaaagaaagccaaattctgagccagcagtacagctgggaaacaacccaattaatactgcaaagtcactaaaagacttgggttctggaaataccaggaatttctagaagtagggggaaagggtaaggaagaaagccaaaatatgctttattgggtgaaatatttttgagcactagttagaaatctagatcttctcccccatttcatgatgctgagtgactatacatcttcctccctggcagaaaaatggatatttattttctggcaagatttattctcaccaggattggctggcacacttgagaccacgggtctcatctgaaaagcagggaagttacctgactgtacacatactgaaagctgaggtcctctaacacttttttccagttagttctcagaatgcagactgccatactttgagttccaggcaaggggtttgaaatacttctctctgagaaacctgacaagtctaatgatattgactcaataatctagtgctctctaataaaccactgaaaaactcaggggcttaatataacaacttattattcatcataattctgtatgtggacagaagagttctttagcccctcttggcattgactcgggtactggatggatggaatcatgtgaagcctcagctgaggctgtgagttaaaggtctcagttcttctccacgtagctctgtctgcatgactgcctcggctgccttacatcatggagactaacttccaagtaatgtttcaataggcaggagttcaaaagggaagatcaggactggcacagtatcactgccaccatatttcattgattaaatgaggcagaagcccagcccacagtcagtgtaaatattcatgaattctgagaggcataaggcattggaggtcaccaatgcagcagtccaccctgttcactgacatcgagggctcaccgcaaagaacccatcacattatccttaaggaaactcaaactggaaaagccccatccacatccttagagatgccaatcaagtttttatttgcctactctgaattatgtttagacaaatcacaatctactgatatctgaaacaactgaggaaatcctctaacacagaagagaccaaaataagaaaagagagatggcggggtggggggcgggggcataaattagagaaactagaaactattcagagagtaagaaacttaaaatatatatattaaacttaaataatatataaataatatcttcagagaaataaaaaactgtattaaaaaacatgacatatatacatgtatagatagatggatagaaagattcaagagcaataaaaaaagctttaaaacattaaaagtctaattgaaagagttggaagataaagttggagatgtctcacagaaagtagcgcaaaaaaacaaaatgggaggaaatttaaagaaaaaaggtgtatacaaattccagggtatctgaataataggcatttcagaagaaacaactgagaaaatggaatagagttgatcactataataattctaataagtctccagtatggaatttccagaatgaaagggatcagtgagtgcccagaacaacgtaggaaaatatacctacacgaagggaaagcactgtaaaattttagaatagtgagcccagagagaaagttctacaagctttcagaacgtggaggtacaagaattgttacataacaaaacaaaatgatgatttcacacttaaaattttacttagccaaaataataataaaaatagcagttaaatttattggtagaataatgacatattccaacattttagtaaataatcttccaatactcttttctctggaaactactggagaataacttccacacagggtataaacaataacgaaaaagatatcggatatgggagagttccaacaggcatcacaggatgacagtgcagagagagttcaagaggaaaactgtgaaccaggcatagagggtgatcactccagtctagagaacttgactcaagagcggagggctcttgtcacagtcttctctgtcattgtactatcttttaaacttgagaaatgtactggaaaaagtactccatgaataaaataaaatgaatcctaaaagaacaacaacaaaaaaattaatccaggagacagggaatgaaacccaggaggtagacaaaagaaactcaagaataacagcagaaggaaaacctaggataacagctgtgcaacagtcctggagagcgaccagcccagatggaagaatgaatgtctacctgagggatgtctccaagaaaaataaaactcagctgttagagcctctgtctggatggagttcatggaaaattatagtgaaaggttattgaaagggatggaaacatttacaagaagtacaaagaaacttaaagtgaaaaaaccacaagggaccattattttaaaaataaaaaaaaaggaaaatctagtcatggtacccaacaatgttcagctgtgaaatgctttactctagccataggaatataaacactgcatatgctgtaacagaaaagtatcatataactgtatcaagatgatgaaagggttgaagaggaaatggcaatggaaaagagtgaattattcatttctcatactagaaagctaatagataatagagaaacataagactattatttagaaataaccgtctgctcttattattttgataggataaaattaatttaaaataattgatgttaagaaaaaaagtatgatgttcttaagaaaagtatgtggtgtgtagttgagctaaaggacctggggcagttttcctaaggaaatattcaagataagactaagccagcgagcagaaatttataaatccaaattgagaaagcagggaagggggacagaaatgggggaagcattccaggcggtaggatcaacaaatataagaaacttcataggaaaaaagcctggtagcatcaagatactgaagaaaacctttgcggcttagcagttaagacatgagtgacatgcaattaagttgaagaaacaatcagtagccaaagcatatagagtcttgtggacatatgaagcattgtgaactcaacccttaagtcaacaggttttaggcagagaggaaactgacttttatttatttttaatcttattaattatttagtattttagagatagggtctcattctgtcactcatgctgaagtacagtggtgccattatagcttacaatgaactttgatctctgagctcaagatatttgtcagccccagtctcccaagtagctgggacctcaggtctgtgccaccacacctggctaatttttaattttatttttttagagacagggtctcactatgttgctcacgctggtctcaaactcctggcctcaagagatcctcccacctcagtctcccaaagtgctgggattgtaggcatgagctatcacacccggcccaggaactgacttttaaaacactagtttggcagctccaaaaccagttttggagactggtttggtggaggcaaggggaatgcagagacaataattatgaagattgctcagtagttaaggaaggagatgatgaggaaaataatagctgaaagtcaaaacatgtaacatgcagagagccacatctacaaccaagacatgtgaattgaagtccagtgtttgacctctacactgcatggcaagatgacagtttagcattaatgtgatcataagaataaaatttttaaaaggtggtttcatttcaatagaagtaagtaggtggaagtgtctattttaacctggaaaaagagaaactgtgctttttagctcatgtcacttcctagagttgcccattcatttgttcatccattcagcaagtattttttagcaccagctgtatgccagacactattcccaggagcgcagctaagaagaaaaaaggtctctgatgtctttcatcatacagctttcattctacctgggtagacaacaaagactatatttataaaaaacccgccacaacaaaacaaattagagagatagagaatgccagggtggagaggtaaagtggtcagggagactctctcaaaaagttatatttgataggatgcctgtgtgaattgggggtagccagttagtgatctgggagaagagaattccttagaggagaataactttcctctatagctttccacttctaggcagaagtgatgggcaaaggtcttgttttgagagttgtacttgatctgttaaagatatagcaagcctggagtggagaaagcaaaaagaatagtaaaagatgaggctggagaagtagccaggacaaaataaaataaggctctgcccatactcagtctcaataaattaaagattaaaaggtatatatcaaagccagtatttctaagcctgggctgtggtaatagcctcctggttgattttcctgcctctactctctctgttcagtcatcatgtacaagattgccagataaatcttcctaaagcacagaattttatcacatatctctcctctcctcaataacttttactagctttgctggatcaaaaggaaattcctcaagcttgaccggttacctgcaaaccctttcctagccagcctttcctttcctatatacacttgtctctcaacatgcccccaaatgggttccttgtttcagtatttctgtgcccctcaccattcactaccagcattctgtgattcttacttccatatccttcaatactcaagtcaattcaccttggttgtagatgtccaattcctattttcagagtgcttaaaataagtaaggagaagataccaatcactgtgatgcaatggtagaaatgagatgtactattgaaaaggagcaatttttgctatggaatgtttcaaaacaggagataactttcagctgaagtgctcctggagaacttagtgccttgacgatttttactatcttgaactattgggtacccttatagaatgctttggatttattctctttctcttgtgtgtttgtcctctagaactagactctagcccctctagagtgagagatattgtcttctgttaatttccagtggctgtcaagacttcccacagggtctagcatagaccaggaagtctctaaatgcagatgcagtgaaaattgattgcatttgaatccaaatgccattattgcacaattgtactattacgtgatcctgctgagcaacctttctacgccatagtcaccacccagtggactaactgggaataggagtttacaaccttattaataaagaatatgtcagcaccagatatatatggtcttttggtttggactgacagctcatctgcaattcttctattaaattaaaatgaatgatttctaattcattatggtaccagtggtgggtatgttagagtcgaaaggatattttctgtatgagtgataagactatcagaacacagctggtgatatagttaggcgttgtgtcctcacacaaatttcatcttgaattgtaatgcccatatgtcaagggagagaccaggtggaggtaattgaatcatgagggcggtttcccccaggctgttctcgtgataagtgagtgagttctcacgagatctgatggttttataaggggctcttctccttcccgccaccgtgaaagaagatgccttgcttcctcttccaccgtgattctgtttcctgaggcctccccagccatgctgaactgtgagtcaattaaatctcttatctttataaattacccagtctcaggcagttctttatagcagtatgaaaacagactaatacagctggtatgttggaatcgattatgagaactgtgtgatgttatggataacatactagaaattttgaacaactcatgctttttaaaaaacctatttttgttcttatattatctaatatcaagatagcatatgattttgccattatgggagaaaattgataatccatagtctaaatcatcctttaaagatcaggagatttaagcctggggagtgaaaatcacttatctgaaatgacacaattatttagtaagaaatctagagttagagcctgggtcatctgctcttgtcccagctctttctgttttgtggcacagtctcctcaaaggggcagatcctcagcaaaattcttattacttttgttcccagttgctgccagttttcctatcagtgggcaccaccaggaaaaataaggcagcagggcagcctcgtgtacaaggtttttctattttaccaacagattgctctcatgcttttggggaaagagtaaccttaaaatgatgaatgcttgtcctattaaaagctcttccagcacaggcattattgatagtgtgcaaaaaggacatccattttagtgcaaatgaaaattgaaatggagagaacatcatgtcttttttttcgaatatatgatgctggctcacgtacagtgtgattggtgtgagctgaaaacagctgtccagagtccttacgacctttgcctacctcccactggtgataacaaggacagctgatcagtaagaaagctagtttcctaacatctatataataaatgtacagccttagcagggcactcaagcaccctcatgatctagtatcaacttacctcagatttgttttccattattttttttgtctcaaaaccaatgtgctagttatctgaggttattctcattatgatttccagatcattttctgtttttctgagctccttcctgcatagactgtttcctctgctttacaatcctttcccttcttttctgcaaggctaaataattcttttccttcatagttcagctcagtttcaccactggagtcttttccaccccttctatttgtcaagttgcctgaactattgcatcatcaggagacctctaacgcctttgaatttactaaggatattcacgttacatggaattatggtcagatatatgtttgtcttctcatctagagggtgtgcttcctgagagcagagagcttgtgcatctttgcatctccagtgtctagcacaatgcttaggagatagcacacaattaaatatttggttaaagacgggaactataaatgagtggtgagtgaatgaggaacacatgtgagaccagaaagcttcatgctcttggttacttcttatttagaaagactttctcagccatagactcaattttagccacagtcagtcccaattatcagaaatttggagaatctgcctgggcaatcatcccagttgccaaggtttgtgtcatctgtatatcacctagtaatgattttccagtgagtaatatggagctcacctgaaagaggtttgtctattaaaatccatctttttcagtgacatgacagagcacttggaaccctccatgctggataattaacattcatgcattaatctttctgctttgtcattgggtttgaaccctgtgccagtgatcattatctcatgatatgagaatttcaaagtaaactggcagttaatttaacagcatttaaaagtaatgaaagagtaaagatgtcagaatgaaatacacatttctttgaaaacccagacaactattgcaactattttgaaatccggttaagcatacaaacctttaaaagggcaggataaaagaacagctgaattgtgatttagttcagacagggaaccattagggaggcagtatggaaaaatgaaaaaaggattaggcttagagccaggaggcctggatttaaaatcctagcttcacctgttcttcgctgtgtcctcttagctaaattcctgtttcttttgtccataaactgcatattaatttctacattgcagcattactaaaggtagaatgcaataacatatatgtaagcccaagatctgacacgaagttggtgctcaagaaatatgccttaatttcttcttcaaaaaaagaacatcgtgacagagcatgtgttatatctccgtgccctttgtgaacatagaaaaaacagctgattcggaaatggggatttagtggaatcaaatatgcataaggagctaagatcactcaggagcttagtacagcacttcagacttatttcaaattgagagaaatcagcgggcctactcaatcttactgccccactggaacagcagctaaaacctctgggtagctaaaacaaataagacatgtctaataccaagcctagactcttaactcataactgaaactcataatagtagaaagagcagaagcttttggagccaacaagaactaagttcaaatcctagttcagctgcttctaaatcccatggcactaagagtcatgtaattcctgatgactgacccctctgagttgcagttattttgtaggtaaaatgggagtaaagtacctcctccacaggatggttctgaatattaaatttgataatccatataagcactaacatagtacctgaacacacagtgggtgcctcacaatgttagctttctttccaacttggatcttagtattggttttcccttacagactaactattaatcacaaaccataaagtgtgacagctgaacaggtccatgggaatcatctccaggatttaaggttatattacatggatccctaggatttctgagttgtaccccatgccacatgaggaattaagggggttaactagggcagagttctctaacctcttctttgtttaaaagaaatggatgactgtaccaacagatccaatattggcatgacaaatgcctgcgaaccagtgatctattctcaaccccttatttcatatttgagtaaacttgagccagttaagagtaaggacttgccagaaatcattctgcctgggaaataggtaaaggcacattcaatacgtaacatagagttgggacatgttgttccaatatctacgatgtcaggtaagataaattagtagaaactctcacaagagaatatcatctcctactttttgtgtgtgttttcctaaaggcccctctcccctccacccaaaataacctcataattttgccccaaactagctctgtttacaaagaaatttgcataagagatatataactatttctattctgtaaataaatttataaaggaaagtgattatgtgtcatgaatgatatattagaaaggtgggaataggcactgggatttgggatgaaggtggagagataataaactagagagcaaacttccctacctataaaatgagatacttgagcagatattttggtcatctcttccagttctactactttttatagttgaaaattttatcaatcttctcccaccttacatttctcatatgccaaaagcagagaagttttgttatagaggatgtctcttgggtttactcagccctacacttttctcaagtcacttctattcaagtacttgactctgttgctgggacactggttcattagaggacactgtcgtctgtccctggtcctgtcccatgtggcaatggcagcactgaagtgtgtcaatcagacaagaaagatatttcaccaaatttgctttggtctgcacttggtcactgaatgtcagcttcatttcttccttctgcagccttagcttttgttttgagatccatcaaactttctttcccaggctgaattaaatgttcttattcctaccaccagcctctgtagcctgcaactcagcaaagcttattcttgagcactttggaacattacaagcaaagcagtccacacaaagtcacccataccagttagaaatgctcaataccattactgtttccattatatatttatttggatgattataagattaatgttatgttaatttattatctaatgatttttaatttgacattttgttcagtgccatacactttaaacaatgttttttgtatctactctagctgggatagtggtaaggtaatctggcgtacagtggagaaataattgcttggaagaattagatgttttacacacaggggcaggcttgcatggaatagatactgctttagaggctgataatgtatcttagataatttttatttacagatgacatttattttacttcctgtttgtgggaagtgagaagaacatagacaaaggaccaacactttcctgctttatggatatttaaaattattcattaaaaacctgcgagagatcaaatctcatttaaaaaatccagtctaaagatgtgggccactggatttgcgacttaccatttcctttaacaaagtacgctttgattcctttaatgagatctgaaagattctaaattatctgactctttcttctttctgcattgtgcctgtagtctctctcctctcacacagactggcttcgtctcttccaaatgaaggtttttgcacaggacatttcgtgtccctggagtgtgtctcttcgctcacctgtgatatcttatctggccaacttctaacctcagtctcagcttatgtgctactttctcaaagaatccttatcctccccaaatatgggtccactatacctcttttcctctctcatatcaccatatagcttaccttcatatcgcttaccctataattttcatacaattgtttaaaatatatcttacctctttcaatatgatacaaaccatgatgtcaggggtcatgcatattttatctatatttcccatgcctagaacataatgaacactcaacaaatgtcatggtatgagtgaatgtttttcattctattccttgtttcttcaattctggactcagcctgataaaactactgtacatctttgggcctggtgggtaccaaagttattataagaaaggcaacagatgaaaattttaattttataataaactgatcaaattaatttacatcaacataatgctcactacttacatttcagatgaatattactaatcctcatttagggatgatttggtagtaaaaataagaaattcactcaataatgccaaatataaacgttatattttaggaataccggaaaattccttagaaccaaatgcagaataaagacttttacttcataggactgaaaagtcctcaggcaatcttactttcttattcttttttggaattaaaaagtatatatttgcccttcctgatcatgtcatgactttgtttcataactgtttcctcagtgagcctttttttttgagacggagtctcactctgtcacgcaggctgaagtgcagtggtaccatgtcagctcactgcaacctccgcccttcagtgagattttaattacttcctctcataattgtgacttgcataggcaatggcttgtcatgagcctgactctgtccctaagtctgtgtgaccttgcaactccagggccttgcatttttcactcaattgccgttttcctggctgacttcaaactcttaagaggcagatactgccatcggttgctgtctattcagaagtttggctaattagaatctaggtaaagaaactctttgtaaagaactgcaatgtggcaacagagtccagaaacaaagattcatgctccagatattgctttgaataagaaaacagcagtaaagaaaacaatctagacataatcctatcaaagtattttatggaataattttggtgttgattttggaattatatgtttatctggttgttcttctatggggaataatttattactcaatgactatagggtggtgttgagtcataagtatcatgatgatattctaaaaccgggggcagaggcaagtctcaggtttgactttgtttcctaagggcaggggcagtgtctatgaatcaatagctgccatgagtgtttctgtacactctgtaggtgctcagtaaatttttgggtggctggccactcagagaagtttggaagctcctgtattcagtgtgggttgtttgagtggttcccatagttcagaatgtggagtgtgggtcatgctaatagaaacttaagtatgagggttttaaagagtgaagatgctgataaatgctatgcttgttctctctgaggcctgaatcaatttaaatagacaaaagattaccaaagaaaaagaaaatactttggttttattacttcttaaagcagagtggagaacaagatgggcttcctaatactctcacctccttctcctgctcctcctctgcaccttgttgaagtctaggcctattgtgaaaattggattaatgaaagcactagctccaaactgaaaacttcaaggaataggtaacttctatcttactcaagtagctctagagacaaacaaaaataatgaaaagctatccgacttattttacgatggtagtataatcttgatactaaaaccagaggaaaatgtgagtaaaacaaatctgcaatttcatgttctaaaataaataataatgtcttagtatttagcaagcagaattttgttgttcatacacctgcagaggtgaatttactatgaaaatgtgacatttaagcctcagcatccttcagttagaaggacagagtctcagcattccttctaagtcatattaccatatttggatttgggatttttggaatcctttcttaaagaaagatcccaaattttacctttcagattctatagaatgtggtttatctccttacatttgcatatgcacaaaagtatacacacaaatataaacataccatgaccaattagtatttacacaaggaatgcaataatctattaatataatttgccacaataatagaaaaaagatatagaaatatatgatcatattaaaaatggaggaaaaaacagctttagataaatttcattacccattcttgacaatggaaagaagtttacataatctgttaaagagttactatgaataacctccactaatcattgtgcttcattatgaaatgttagaagtattggtttgaaaggacaagaaaaggatacccactcttgcagctcctattctgtgcaacccttagggtcatagtcaacccagtaagataataatagtcaacccagtaaaacaatataaacaaatagtataggagtgaaaataaaacataaaacagactttatttgaagagctataattgtatatatggaaatattcaaaaggatctaatgacaaacagaattaataaaaaggatacagcaaatttacctgacacaaaattaacatgtcaaaatcaaagatgttctgatgcacaaggaaaaaccaattagaaaatttaataataataaagtatttatgaaataaaatgttataaattaatgcatacagtacaattgcaattgaaattacattatggattgtgaaactaaaaacattcatgtggatgaaatgagaagagccaaaacaagaaaaataatgagacagtggtagtcactctatgagatattataaagctctagtaattaaaaccatttgatacttgtacaaaaatagatgagtagactaatgggacagaatagaaagtctaaacagaggactacatagataggagatgttggtatatgagacgtatagctgcataaatcaatgagaatatcagggactgagtgattaaaggtgctggataattgggtaaatatgtgggaaaacatgttcaatggctttctctcataagacaaagtcaatttcagatagagtaaaaacacaaatataaacagcaaaacttaaaactttttgaaaaaattataggaaaattttattatgtcttgagcatggagaaagatttcataaatcacacaaagaataagacataaaggaaaagatttaaaaatccaacagaatcagaatgtagaacttttatacaccaaaagacatgaaacagttaaaagatgagtcactgccaataaatagatatttacatcacttataggcaacacatgattagtgaatatgatggttaatattgaatgtcagcttgatcgaattgaaggatgcacagtattgttcccaggtgtgtctgggagggtgttgccaaaggagattaacatttgagtcagtggactgggagaggcagacccacactcaatctgagtgggcaccatctaattagctgccagtgtggataggataaagcaggcagaagttggaaggagcagacttgctgagtcttccaggcttcatctttctcctgtgctggattcttcctgcccttgaacatcagactccaagttcttcagcttttggactcttagacttacaccagtggtttgccagggcccctggggccttcagtcacagactgaaggctgcactgttggcttccctacttgaggttttgggactcagactggcttcctccttcctcagcttgcagatggtctattgtgggatttcaccttgtgattgtgtgagtcaattctccttaataaacttccttttgtatatatacatatgtcctattagttctgtccctctagagcaccctgactaatacagtgaggtagacattaaccatgcccgtcatgttttgcacacttcctgatatttagggaattccccattgtgtgatttctgcttcttcaaggaagaaatcaggtaaggcatgggcaggggcctaggtttcagtgattgatgcatgcagaaaagactttgaacaggaataaagctcttggttttaggggactgcaaaaggtgtgtccaccttcaggttccacttctgttagtggtacatgaagtatttgggcccagctgtgaagcagtgaggtctttgttgggacaatcctgcagtgtgatttgggagaaccacagggccttgagtctgactctttaccccttctggagattctattatattagctgtccagtatccttttaacatacaacatttctgcttaaactggctacagtatattcctctgcttgcaagaacaatgactaatacaatttttactcaggctatataaagaaccctcaccaaatcaataagataaaagaacttaaaaaatgaacaggcaattcagaggagaaaacctgaactgaattgctaactagtatgtgaaaagatgctcaatagcactagtaatcaggagaatgcaaattaaacaacaatgaggcaatgcttcacactcatcagataggcccacattaaaaatatattaagatcaactgaaggggaggatgtgctaaaagataaactgtcgcttactgttagaggaatggtaaattggttgcaaccatatgggaagatacacattacataaagtgaaagctgtgcatacctaggacacaagtatgaactccggataaatcttttcccatatactcaaggcatgtacaaagatgttcaccagagtttattgtaatatggaatatttaacaaaacccagaaattgtaataggaggacatacataaataaattacactcttcgtattcagtgaaattccatgtaaatattaaaatgaattgataaaataaacatgtaccagggataaacatcaaaacaatgttgaatggccaaaaaatcatattgagtattgaacagtgtcataccatgtttgtatttttttcaataaaaagtagttcacaaaatacagtttagggatttatacatatgtagtgcaaattttaaagttatatgcatcaatagtcttcaccaattttgagatgatgtttaactctgcaggaaaaagggtgggggtgagattaaaggagaaagcttccaattatttccattgagggttacttttaaaatatattattgaggtatgtgtaatacaatgattaaatgttagattatgtggtgaatatatgtgtgtcttttacattactcccattcttacatatatatttgaaatatttcctatttatatttataattgataactttatggatatttaaggaaaggaagacaaacagaagaatgaaatggagatgactgatgttcaaacaagaacagcagtatggtccatgtcttgggaagttttagcctaatacagcataaaaatgtgcagcaacaatgcttttcagcctctacttactagtctttccagggcatgggtgtgaatcccccttcttaaactccagatcagttacactgacattcagtgtggtatttcacacaagaaaaatgagttttgcaagtctgtattcccctgaacgagcatataggagatattaattaatgctggttcactgcttaaatcaaggaattactatcaaggccattatccttagcaaactaaagcaggaacaaaaaaccaaatactgcatgttctcacttataagtgggagccaaatgatgagaacacatggatatatatagaggggaacaacacacactggagcctaccaaaaggtggagggtgggaggagggagaatatcaggaaaaataactaatgggtactaggattaatacctggtttatgaaataatctgtacacaacaaaccctcatgatacaagtttacctatttaacaaacctgcacatgtgcccctgaacttaaaagttaaaaaagataaccacaatagtagtagcaaatatactacatggtagggttgcaaacttaagagtcaaaatataaagtgattttaaagtgaaaatgaaaggtagctaaaattgctcttgaatatcctgttgcaaaacttcaagttgtgggaagttagtttcaaagaggtttaatatagcacttcccacctgccttgggataatttttttcagttaaaaagtagtataaaagtataaaaaatagttgtcttgcatttatgggtgaagttgtgctaaaaatatagtatcataagcacacacagggagaagagaaggctatgctgtcagaaacataaggaacctgggcttaagagaatggctctgcctctcccatgtcaaggttgcttttggctgcacgctagtgaatggattatcaggtcagatcatgtgctaagtcattgtttattcctcctttgttattatagaccaagctggtgcaattgaatttacataagttaattgagaatatgatgtgattcaaccttaaatagaattgtttcattattaccaaaataataataatcagttaaagcatgccggaaacctgctgttttaccaatgcaacatcatcctaacatgctcacattaatgtttttggctaatttgtttattttggatcaattcacaagaggacaacttccaaaagcttccccactatgcttcatttctacaaattgctgtacccgtgcctgaaaaattcacagttcatcttaattttccactacgtgtgtgctggccatgtgacatatcccaaaatgtcaacacaggaacaagcatttctaagaccatgatattggctgttgtctatagccctgatctcttcaagagtggttcccagttgctggtaaatttccctcagggaacatctggcaatatctgaagatatttttgattgtcacaacttggggatgagacgaccacgtatctagtaggtacaggccaaggatgctgctaaacaatctacaatgcacaagatagctctttgttgtcctaacctgtaaagaattaatctagcttaaaatgtcaatagttcagaagttgagaacccctggcttgaatgagagaattaaaatgtggagataaaaaggtcacaaaggaccattgagaaaccagacatgcactgccctagcagaggttctccatgagggctccacccctgtagcaaacttttgtctgggcatccaggctttcttatacatcttctgaaattcaggtggaggttcccaaacctcaattcttgacttctgtgcacccacaggctcaatgccatgtggaagctgccaaggcttggggctcccaccctcggaagccacagcccaagctctacgttggcccctttcatccatggctggagtggctgggacacagggcagcaagtcccgaggttgcaaacagcacgaggaccctgggcctggcccacaaaaccactttttcctcctgggcctccagacctgtgatgggaggggctgccatgaaggtctctgacatggtctggaaacactttcttcatagtcttgggtattaacattaggctccttgctatttatggaaatttctgaagctggcttgaatttcttctcaaaaaatgggtgtttcttttctcctgaatcgttatgctgcacattttctgaatttttctgctctgtttcccttttaaaatggaattcctttaacgctacctaagtcaccttttgaatgcttcgctgcttagaaatttcttctgctagataccctacatcttctctctcaaggtcagagttccacaaatctctagggcagggcaaaatgccaccagttcttttgcttaaacataacaagagtcacctttgttccagttcccaacaagttcctcacctccatctgagaccacctcaccccagaccttatttttcatatcactgtcagcatttttgtcaaagccattcaacaaaactctaggaggttccaagctttcccacattttgctgtcttcttctgagccctccaaactgttccaacctcagacctgttacccagttccaaagtcttttccacatttttgggtatcttttcaccaatgcaccactctactggtaccaatttactgtattagtccattttcacgctgctgataaagatatacctgagactgggaagaaaagaaggtttaattggacttacagttcacgtggctgaagaggcctcagaatcatggcgagaggcaaaagtcacttcttacatggtggcagcaaaagaaaatgaagaagcaacaatagaaacccctgataaacctatcagatctcatgagacttattcactatcacgagaatagcacaggaaagaccagtccccgtgattcaattgcctccccctaggtccatcccacaaggtgtgggaattctgggagatacaattccagttgagatttgggtgggaacacagccaaagcatatcatggtttgtttgggaccttataagaaaacaaacattttgatgggaagaaatgagcccaaatccaggggagtactatgtactctaatgatgctagtaatttaggcatattaataagccacaatttggagatatcatacaattgaatttcaatgtaaatcctttttggtgaatgaattagtacttccaaatatggctaaaagtatggtgtttcaagtatatattgcagtgcaacaaactagccccaaacctagttgcttaaatttgttacttttcacaatgttgtagcataggaatttggatagggttctgttgggtgattttcctgctccaagttgtgccagttgaggtcattcactcattcagtttcattaagctgacacctgatataggccagaaggtctaataagtcttcaatgtacctgtctggtttctcaatggtcttttatatgacctttttctctccatattttaattctcttatcattcagggtttctcaacttctgaactattgacattttaggctagattaattctttacaggataggacaacagagggctatcttgtgcattgtaggatgtttagcagcatctttggcctgtacccactagatatgtggtcgcctcatccccaagttgtgataatcaaaaatatcttcagatactgccagatgtttcctgagggaaatttaccaccaactgggaaccactggtataaccctaaacttttaaagcatggcacctggctttccagagagggaaagaggaagctcctaatcatctcaagactggggcacagaaatcccaggttgttacttttgccacattcttgcagtcaaagcaagtcatatgtcatcccagactgaagagaaggaaaaaatgactctacttcctaagggaggagaagcaaagaatttggtgctgaccttaatccatcacatatagcttcttttttgctcttatgtgaagtcttctttcctgttctacaatctcttttctgtgtcccattctatttttatgctttccaagactgttctatgtaaacacagaaagtccatattggtaaagagtcagtcaatgctctaagtcgggcagacctgggctgaaatcccagctctgacatgactggttgtgtgactttttcaaattttaaaacaactatgcatccatttcttcatattttacctgcatcttcagattactaccccttagggctgttgtgactattaaatggaataatgaatacaaagctctgaacatagttcctggtgcttaataaatgttcaatcaatgtttattatttttcatagagtaattgagattttgtcctcagtttttacctctgaatttacacaaagttaattttaagaatggcccttatgaagtgatttctaaggcacctaatgctactgccagttatgtgttaatctggaaaggcttctctctttgtatgtacaatttgctatctctgttttccaaatggaatgcatatggtgtcccaaactggtgttatttgtactgctgtggtacagagtaattttggtaggaaaaattactttccagtttgaatctaaactgaaatcgaacattttccattgagtataagtatgatagtcatattatttacccataacatcagtaaacatcttgttttgactgtaacagtttgagatttgacaatttaactactttgcttctattgttctattaaaaacattgtaggcagagcacggtggctcacgcctataatcccaacactttgggaggccgaggtgggtggatcatctgaggccaagagttcgagaccagcctggccaacatagtgaaaaccccatctctactaaaaatacaacaattagccaggtgtggtggcagatgcctgtattcccagctactttggaggctgaggtaggaggtggagtttgcagtaagccaagattgcaccactgcactccagcatatgtgacaacagtgaaactccatctcaaaacaaaaacaaaagcattgtataaaaattttatgggggggatttattcttaaataaaatttaaataaaattaacatttaaagattaatataaaaattaaattaccttaaatacagaaatactattattttaatatgtatatatatgtatttctcagtgttttttcaatcatgtcaggactatttagaaataaatgcatagagaaagaattgtattaactccaagataaatataattttataaggcatgaaaattatgcaaacaaatttaatgtcaatgatttataagaggcagtccttaacacatgtgcaagggagtcattaacattcacttgaacttgaacaataaaattcaagtaaaataccaaataagtatccaggtgaaatcaggtttctgttctgttggaaactcccacctgcacactaggctttcagtctctcctcagatacgtggaataggaaccttgactaaaacaaagcagagagaagagacagaattcagtgtagggactatgacaaggttgaagagctggccagaggcctggaaatgtgattttcacaagaatgataagaacaaagacacgattatagcaagtccctcaaagacatcttagatgaggcaaaatctgggattaaaatgaatggatttgtttagctgcatcaagcataagatatcttcccacacagataaaattggaagatgaaaaacaaagttgccaacctgttcctggatagatgagagaatataatgactaaaaggcaacaaagtcattttcatgtagcgtgtgctaaataaatttaacaggaagacagcagaagttagaaggtaccatgtgggtcaatctaaattgggaagaatcaaggtgagtaaaacagcaacaaaatgaaaaggcagccagcagatttggaggaaatatttgcaaaccatatatcttatagggggttaatacccataatgcataaggaacttgtacaactcagtaaaaaaaaaaataataatctgactaaaaatgggcaaaggacctgaatacacattttcccaaagaaggcaggtaaatggccaacagttatatgaagaggtgttcaacatcagtaattatcaggaaaatgcaaattaaagctgcaatcagatatcacctcccacctgttaggatggctattatcaaaacacaagcgatcacaagtattggtaatggggtggaataaagggaacctctgtaccctgttggtgagaatataaattggtagagccactatggaaaacagtgtggaggtttctcaaaaaaaaaaaaaaaatagaagtaccatatgacccagagatctgtctgctgagtatatactcaacggaaataaaatcaaaatcttgtagaggtatctgttctcccatgttcattgctgcatattcacaataactaagatacaaaaacaacttaagtgatcatcaataaatgaaaggataaggaaattgtggggtatgtgtgtgggtgtgttcatgatagaatattactcagccttaaaaaggaggtgaattgtgtcatttgtgacaacatggatgaacctagaggacattatgccaagtgaaatgagccagacatagaaaaatactgcatgatctcatttatgtatggagtctatatatcctaaaatatatagaacagagagtagaaaggtagttataaaagaagatgaggaagtggatatagccaggtcaagtggtacaaactagcagttatgtagaatgaatatgtctagtgatctaaggtatagcatgaagactatagttaataatattttattgtaaattgaaaatttgccaagagggtagattttaggtgcccttaccccctcaacacacacatacacactcataatagttaactttgtgagttgatgcatgcattcatttttcaagccatttttaataacagcatttcacaagctagttattgtggatacaacaatagagacccaatgtatgttcacacttagctctcaggatacaccctttactttatgttggaataatagcttctcagtctcttagacttctcttgcataatcatgcttattcctagggcagaaaagaaaagaaattcctcccaagataatgatggtttatgagaagtaaaaagacaagttaaggccaagtttaaaagaataataacagtaattattattactgctaatatttgatctgtgtgtactatgattcaggctctttcctgagtgtttcacatacattgtttgatttaagtaagctgaagttcaaatactgggttgaataaagctttgaaaatcagatgaaatcaaaatcaaggtcaataagccagatctgaaatgccaggggagatggaatcaagagaaagaaaatgaagcaatggtagggggattacctcagaaaccatctcatacatatgaggtaaaaggagcatcctacatgaataggtcaggcttgcttagagggtgagatgcagatataaacacagtgcatgctgtgcccatcacacaaatgtccttccccttctctttgctatacacaaaactttcaggtttccctatcctgtttaaacaaacttctttctctttcctttaccaattctcatcaatgtgacttcagaccccacctctcaactgaaactatggtctttactatcactgagaacacattgtttgaaaaacccagtgtcctttcctaatcttcactatcctcaataattttaaagcactagatgctgttgattagccattgtttctttaaaccacttcctctctgaaattttttgtttcgttatcttcgactgtttctttttcctattactttactgaatttccatccatgccccgtgttttatgcttttatttctgttcattcactctctctgaaagcttacccactgctgctttttaaactattccaaccaggtaggcaaattccagttctcattttcaaagtataaatctaattatctacattccaacactgtctatgtctgccaagatggtgcatctatttcagtcaggacaggacaagttctacttcacaaaaaataagcctgaaaaattagtgataataaaaaaagtatttctactcatgctacacccaatgtacagcaacttgttctcttccaaactggctcagggatccagatgtgatgtaaacgtggaaatggcatatattctttccaaccacattctgttggctggaacctagctgcatgatcccaacttaactttgagggagtctcataaatgtagccttcatagccttcacgtgaacactagagggaacaaataaaatagaatttgataaacactattttccctacatattcccactcaagctgcttattaagtctcaaatctacatcatagtcttcctctccaaactgtaattagctaactttaacaatttccaatagtcattcattgttttttcttgaatatctcaagcttaaaagaaatattttaaacaagtatttacacattattatataaatttgacagttacaacctattcttttaaaatatcacttacgcattttcagtatagccatatgccatgtaacatttcagtcaatgtcagaccacatatacgacggtggtcccataaagtattttaactgtgccttttctatgtttagatatctttagatacacaacttcttaccatagtgttacaattgcctattgagttaaatacaaaaaaaaaatatgctgtacagtgtttgtagctaaggagcaatgggctatgtcacatagcttaggtgtttggtgcggctctaccatctaggtttgtgtaagtacactctactatgttcacacaatgccaaaatcacctaataatatagttctcagaatgcaccccattgataagtgatgcatgactacattaataccttagactagacatttataaactacggcctgcgttacttcaaacatctctcattatattatcttccttctcagtttttctctatcattattctgaaattatttttttaaaacgatgtttcctttatggctcttccctgcttaagtgacttcctatttttctcagcatcaagtgcaaacactcaaaaatctcatggccttgcatattctggtaccaaaaccacccagaaggtttgatactccattgctctctaacatgttccccattgcttccagtgttccctgggacattcctctcataatctcctcaccatcccccgctaccttccatacatataggtcaaactatttcatgtcttagtgatcagggatcttttcctagcctaaaatacacaaactcttttattcattgatccaaattctatttattctttaagacccaacttcaattccacttcttctgtcaagctttgtctatttcaaataatgctaatccctttgttcactgttcttagttcagcactttattgcttttttttcccccctatttcatgttggatttttctcctaagctagcatgtaacaattaaggactcaaagctttctcatgactgcagaacttaactctgtgtgctcctttgtggcctatatttctcttaatacagcacctaagagagtaataggcatatagtcaattctaaagaaaatgaaaatgctgcaaggttaagaaaaatgcaattataatacaccaagaataattgtttatttttgtagcacatctttccatagatattttcataaattctaccaggttgttgttttcttggtctattgtgagtagcatataaaatttttatagaactccaaaaaagcttcaatattgtgtaagtactcttgacataaacctatattgatacctttaagtaatacaaaatactacatacaacatttattgaatatgaagtatatggaatacatatgtgtagatatatgtgtgtatatgtatatatatagagaaacagtatatatgtgtatgtgtatatatatgtacacatataaatagacaaagaaaaagaaaaagatatctgggcaacttccatctcgaaacctacgtgcagaatttgaagtttgtgcattaatgttttcctgaagatttaggtctcctctggacatactcagctgttcttttgggtgtttgtgctttgatcatgtttgattatgggctttcaggatttggtgactcgtatcatgagtgcaggatgcttacatgtcttttcttcaacttgcagccccctatcaatgagttcttgatttcctaaaaggagtgtcaaggatcaagcctactttgccgagttaccatatttctctcttcctttaaatcctctctggggaattactttcggtgtccatcagtttttccatgaggtcctcttccctttggtgccagcttcctctttagtacattcctataaaaaattctgtaattgtcatttcactctcaaatagatacgtgactataaaaacttaaatcgcccctgcctatatgtatgctcacctaaaattagttgactcacagcaaaattattcaagatatttacaaatgccacctttctttgctctttcagtttgttccacacctgttagttaattcagtggggtctctggcttctcttttgttggcattatcctgcgtgtatcccatgaagccccagaatgatgtggggacatgtaagagagccccttttctgtaagaatattgctatcctgtgagtgtttcagtggaaaaggcacttgaggaaaaccctgtttttacagtctgatttaaatatccgcaagtatctaaagaggcaggaaacgaagaatccagtcccagctctgccactgactgcctgcgtgaccatgggcaagccaatgaatctctctacaactcaggtttctcatttgcaaagtgacagagttggaccagatgatttctgaggcccatttgcaatcttctatgcggtaatttttttttcatcattgatattcattgtgatttgcaaagagatgagaattttgagcaaagcttttgatttaaagtctgtgctcagaagtactgcttaccaggtacagtgaatatgaatgaggggatttagatgtttcataggatgaacttcaatggccaccaaaaccttccttctcctgagctccacatccaagaatattctttttcacacctactgttaatccctccgggtaaataggcatgacaataataatgaaatactttttttctgagaaatgttaaacacactattgaccagtcttgcaaatacaagccacatatttaccagcccaccaagaatgtttccaacaatctttctaccagaccctgcctagaaagaacaattagcttacttgtgacttgtcttgaaaataaaaaatatggcaagaatgacctgagtatctactagaatataggaaaatcctgttcctgaccctgataaagtcccactcaagttctatcattatgaagcctcatttctgtttctaagtgggtttctctatctctcaagcttcagtgaacttaaaaatctcctgagagatttgttaaaacacaaacttttggctgccaatctcagccattctgattcaatatgctaggagtgccacatgatttttgcataaatgttcaggtgatgctgctgctgatctgatgagtatattttgagtagtcttactccaaagtattactgcattatttgtcttaattttgcacacaaacgatacccagcaaatattcgttaacttaattagatatgcattaaacataaataaaatgttttctataatcaatgattaatttttgaagctgattctcaagtttctaatttctaaaatgatggaaattataaataataaccaccatctcttgtggtttttatgagaatggagtgagataatttatgtgcaagcactttgtaaatttagcagttttattaaaatgtgagatgtggtagtaattttagcactaatggcaatagaacccactgagatttgagagtactgtaaatttgactgttgaatttggaagtgaattctaaatcctgcaccagggcttagcaggtttctgtaggctagactgggaacctaactcccatgtataaattgggcagtatgctacaattgtttctttctatgagaaaatgcatcccaaattctaaacttaatttttagaagacacttatttataaattggagggatataatgattaaaaacaccttggctttcactgtcaaagaaaggatttacaaataagaatgaggagaaagctagaataatccctttgttactggattatagtcagagatgttcatatgaacttgtgtttgtagataaatatagatagatatagatatatgtgtaaacatagattagcatatatacatatattttgtagatctgtctcctgcaagagcctagaagtagtgacacttaaatagaaacatgcatatctagtatccagatgttagtttctaaacaccatttttccatcaaagaagttagagcttcttgaagaaatggctgatactagtgctaaggcatggaaaacacagaatgagcctagagcatcttgtactgctcaaaagttaaaaatgatatactaaatatatatacatagatgtgaaatataattcactaggttttatatacatatatgtgtgtgtgtatatatatatatgtaaaatagatatatagatgcatataaaaaaaacaaaactatcctgaacgacctcctaatgtccaaagctgaaacagtgtgtaacagaataatgacaatattgagtttcaacccaaataaaaaaataagtgaaactgaaaataaattaaaaaataaaaaaaaactagttattaatcccctaagcacctctccaagactccagtgaaaggcaacttttaatgttatataaaagatagaggatttgaagttagaaacttttatttaaaatttggttctgatacttattgtatgtctttagcaagtggtttaacccaagccttaatttcccagtttgctatcctccttttctgagtcgttaaaagcaacacacaagataatatcctttgaaactataaagtgatagaaaatttagttattatttaccatctttattagcctactgcagtggttttcaaaggcatggtctggagaccccaaattctttatcaaggtatatgaagccaaattatttccataataattctaacatgatatttgttctcttcactctaattgtctcaggagtatacagtagagttttccagaggctacatggtgtgtgatggcaccatcattctaatgtacgatgaaacgcatattgtttttcttgagttttaacaacttctcagttttaatttctaatatggtacatggcaatagacacaaaccacataaacaaaaacttctggggacttcaaatagttttaataatataaagtgcttttgacacaaataagtttaagagccactactttaattgtttattatatactctacaatgataattaaagcaaatttaaaaatctgtaatcaggcatttgagggcaggcttttccttagttagctgaattattactaaactactctaaatttgagaaatttcttcactcagtgaaaaggggataaagccatatgtgtctgggatattgagatgaaaatgtgatcagaacctccaaccctgtgtcaagtgaaggcttacagaagcacaaatgaacagttctaatacaatatagtaaatcttgaatacatttgtatgcagaggaatccctgaggtagagattagaaatatttatcagggcaggaaacatttgaaattgagtctcaaggaagagaagaatggggaaaccagaaattaggtttttattccagaatttcacacattctaggaatcagaaattatgatagcaaaggaatggcagcctggaagagcaaggcatgcttaataacagctggaaatttgttatgatttattttcctaccaaatataggtctcgattgctaggtttcctatcatttttaaagggttcctactgatgttaaaacagcagtttcctgggtgatatgtgagtagaagtcaaaacagcaagagtcttttgggatagaaagaaggattttttttttaggcaagaggagaaaggaagaaataataaggggtcttggttttcatggtaagtacatattattattatttattatactaaaagttctcatggccagttaaattagccatgagaacttttgcctgctttcctgatctcaaattatatgacactgaagcctcaaagctcctcttcattatttctctcttaagaacttcttgaagactgaagggttcagtctattgcacaggcacaatctgatgtgcattttacatatatcatcttgcattgaaagaaagaagtaaactatctttggtgggcagctgactgcataaatatttgaaaaacaatgtttttctccttttcacacattgtgtaagtgcagttatctttctaaaaacccccacatttttgttctctggggtttgatcatcattcactgttatcaatggtacttttgacttaaatatgccattgccctctggaaaccagcttttattttgtcattcaggtgttcagatttataatataaataataattttaatccttcaaaaattcaactattttgtaaggcattttgcttatgaatttcaactgttttaaaagttgtaagttgataaagagaaagatgacactcagcacttcagcaactttaattttcataaatatctgttttatagatttggacaaatcttatagcatttaatgcaggccaatttgctagctttttaaaaatattttatgttcttagttccagattagactgtaacttatgacactatacatttcaaatagtaaaaatagtttccaacttatttagataactatagacacaaccccatacagggtaatgggcaatatcaggatctaatttcaggagtttcagttttcttcccttttcagattgatcatctgcctaaaagcatagttacggaacacagctccagtgagaaaaccaacgacctatatgagatccttgatcctgaaaaatgcaactcattaatttacagattgctgttgacaattcaaaaacaaatgctttaataaagcaagttgtttttgaatgttaacataataaccatgataggcagctttttataatcagaggctaatcattattaatttctttgacattcagtgcagtgacattaattataataagctctttcagtaaacattaaatgcataccagagctctatggcaaatgtgttgccatttggaattcattgttgtacagttactgtgaagtgtcgctgtattatctagttttcagcagttattaatcaaaataaatacctgacttttctgtagatttaaaaattcctgaaatcccgtgtttgagatgtttcatgagttagattttaaaagtttgaaattttgtttgaccttaagaaattatctattttccatagctagattttcttcccttaaatctctacatatggtttttgtttttgtttttatttccatatgttattggggaacaggtggtgtttggttatatgagtaagttctttagcggttatttgtgagattttggtgcacccatcacctgggtagtatacactttaccttattcatagtattttctccctcacccccttgccaccctttccccttgagtacgcaaagtccattgtgtcattattatgtctttgcatcctcatgcaaatggacaccaaatgcgagcaggagtagctattcttatatcagaccaaactttaaagcaacagcaattaaaaaagacagagacattatataatgataaaaggccttgtccaaaaggaaaatatcacaatcctaaacaaatagcacctaacactgtagcttgcacctaacactgtagctttcaaatttataaaacaattaataatacacctaagaaatgagatagacagcaacatgataatagtgggggacttcagtactccactgacagcactagacaggtcattgagacagaaagtcaacaaagaagcaatggatttaaactatatcctagaacaaatggacttagatatatacagaacatttcatccaacagctgcagaatatacattctattcaacagctcatggaactttttccaagatagaccatatgagaggccacaaaatgagccttaataaatttatgaaaatacaaattatatcaagcactctctcagaccacagtggaataaaactggaaatcaactccaaaaggaaccttcaaaaccatgcaaatacatggaaattaaattacctgttactgatcattggttcaagaataaaatcaaaatggaaattaaaaatttatttgaactgaatgacaatagtgacacaacttatcaaaacctctgttacacagcaaaggcagtgctaagaggaaagttcatagccctaaatacctacatcagaaagtatgaaagagcacaaacagacaatctaagatcacacctcaaggaactagagaaacaagagcaaaccaaacccaaacccagcagaagaaaggaaataaccaagatcagagctgtattattctgttttcatgctgctgataaagacatacctgagactgggcaattgataacagaaagagattcaatggactcacagttccatgtggctggggagggctcacaatccaggcggaaggtgaaagtcacatatcacatggtggcagacaagagaagagagattgtgcagagagactcctgtttttaaaatcatcagatcttgtggacttattcattacgatgataacagcgttggaaagacctgcccccatgattcagttacctcccactgggtccctttcatgacacgtgggaattaaagttgagatttgggtggggacacagccaaacagcatcattctgcccctgacccttcccaaatctcatgtcctcacatttcaaaaccaatcatgccttcccaacagtccccaaaagtcttaactcatttaatcattaactcaaaagtccacagtccgaagtctcatcagagataaggcaagtctcttccaccttatcagcctgtaaaatcaaaagctagttagttgcttcctagatacaatgggaatacaggcattgggtaaatacagccattccaaatgggaaaaattggccaaaacaattggccatgcaagtctgaaatccagcggggcagtcaaatcttaaagctctaaaatgatctcctttgactccagttctcacacccaggtcacactgatgcaagaggtgggctttcacagccttgggcagctccacccctgtggctttgcagggtatagcccccatcctggctgcttttatgggctggcaatgagtgtctgcagcttttccaggcacacagtgcaagctgtcagtggatctaccattctgggctctggaggatgatggccctcttctcatagctccactaggcagtgccccagtaagggccctgtgtgggggctccaaccacacatttcccttctgcactgccttatcagaggttctccatgagggccccacccctgcagcaaatatctgcctgggcatccacgtgtttccatcctctgaaatctaggtggaagtacttaaactccaattcttgacttctgtgcacttgcaggctcaacaccacatggaagctgccaaggcttggggcttgcaccctctgaagcaacagcccaagctgtatgttggcccctttcagacccggctagagtggctgggacacagggcaccaaatctctaggctgcacaaagctcagggaccctgggcccagcccaccaaaccattttttcttgctaaacctccaggcctgtgatgggaggggctgctgcaaaggtctctgacatgctctggagacattttcccgattgtcttggtggttaccatttggctcctccttacttatgtaaatttcctcagctagctgaatttctcctcagaaaaggggactttcttttctatcgcattttcaggctgcaaatttcccaaacttttatgctctttttcctttttaaaacagaatgcctttaacagcacccatgtcacctcttgtattctttgctgcttataaatttatttcaccagataccctaagtcatctctctcaagttcaaagttccaaaaatctctacagcaggggcaaaatgctgccatttgctaaaatgccgtctctttgctaaaacacaacaagagtcacctttgttccagttcccaacaagttcttcatctccatccgagaccacgtcaacctggatttcattgttcatatcattatcagaattttggccaaagccattcagcaagtctctagcaggttccaaacattcccacattttcctgacttcttctgagccctacaaactgttccaacctctgcctgttacccagttccaaagtcacttccacattttctggtatcttttcagcagtgccccattctactgctaccaatttactgtattagtccattttcatgctgctgataaagacatctccaagactgggcaaggtgcaaaagaaagagatttcatagagtcactgtttcatgtggctggggaggcctcacaatcatagtagaaagtgaaaggcacgtctcacatggcagcggagaaaataagagagcttttgcagggagattcccatttttaaaaccatcagatcttgtgagacttattcactaacatgagaacagcacaggaaagacctgcccccatgattcaagtacctcccactgggtccctcccacaacacatggaaattcaaaatgagatttgtgtggagacacagtcaaaccatatgaagagcaatactaaaattggagcaaaaaaaaaaaaaaaaaaagataaatgaaacaaaaagctggttctttgaaaagataaataaaattgatagaccattaacaagattaaccaagaaaagagagaaaatccaaataagtttaataaaaacaaaacaggagatattacaactgacatcacagaaatacaaaagatcattcaaggctagtatgaacacctttacgtgcataaactagaaaacctagaagagatggataaattcctagaaagatacaaccctcccagcttaaatcaggaaaagttagatatcctgaacagaccaataacaagcagcaagattgaactggtaattttaaaattactaacaaaaaaaaagtcaagtaccagacagattcatggcagaattctaccagacattcaaagaagaattggtaccattcctaatgacactattccacaagatagacaaagaggcaaccctccctgtaaatcattgtatgaggccagtattaccctaataccaaaaccaggaaaggacataaccaaaaaaaactacagaccaatatgcctgatgaacacagatgctaaaatctttaacaaaatactagctaaccaaatccagcaacatatcaaaaagataatccaccatgatcaagtgggtttcataccagggacgcaggaatggtttaacataggaaagtcaataaatgtgatacaccacataaacaggattaaatacataaatcacatgatcatctcaatagatgcagaaaaagcattcagtgaaatccagcattcctttttgattaaaactcagcaaaatcagtataaggggacatacctcaatataataaaagccatctatgacaaattcacagccaacatgaaatctctacatttgatttttgcacattctctctgtttctcttatttcctgattcataaaaactttttaaaaagaaatattacattcataacctgtgtttaataaactgagtggagagcaactattatttcattacctttgaagtttaattatagagaaaaataatcatcccatgaaaatctgaatactctaaattagtgctaatttattttgtctaaggcatatagattttgttacctcactgtgcttttgttatttttttaactaattgttagtagtgtctttttattctatctgatcagtttcatcatatagtagtgtcatatcttgaggacagtgatagagaaggtgtgaaggctttggagtcagagagctctatttttactgcatgattctgagaaaaggactgtgttcaatctaatgggagaatgaattttgtaaggcttagctgtaatgtagctcaaagcacatgatagatgttctattcaagatgagtattcagagctagcatttaatggccaatttgtgttaagcaatgtgcagcttacaagtgtcattttacctaatcattagaacaacttagcaaggcaaataaacttattatcctcattttaaagataaagcaactaagactcacagatgtttaatattttgccctagactgtataactgatacctgatgatataattagtgaattgaggatttgaactcagaaagtctgatccttcagcctgtggttttaatctgttaccttttctatattttgttatctagctattactcttattattagataattttatgcaagaaaacctaggctttagatcacaaattctcttttaataattctgaaacaggataaaaatattgttctaggcatgttctctacctcccagttttgagtatatttttgccagcaataagttctcttttaagaattctgaaacaggataaaaatattgttctaagaatgttccctacctccaagttttcagtaatttttggccagaattcttccaaatcctctgcataaataatttgtatttttcccctcttccccctcttcttcctcctccttttctccttcttgtccttgttcttcctcctccttttctccttctcatccttgttcttcctctttctctccatctctctgactgtgtctcattctccttatactctccctccttcttcctcactttcccattcttgtcagaactatatgcctgtctttagtgtatttagccacaagctatgattctagactgtgcagagctacctggagtagaggcatttgttcttgctgagctctagattatgttcataactacctccatcactctgatacttcctattccccagcataaacagtagaaatatgcacatttaatacacacacacacacacacacaaacacacacacacacgcaagcagaatcatgaaagaaacagttctgaggatgaattagagccactgatttaaacgtggaattactgaaaacaggagacaccctaagtcagctacttatacaaagcaggggtatttctaacaggacagtcggtaaaagttgccttctccccttgctccttttctttttgccttcctcaacttctccaggtgatttttttttttcccttaaagaagctcaattcttccctagaggttaccacactctatgccattggtttccccagctggttgattaaaataatcctttttcaatttccccaacaaaaagagttagctctcctccaccttacccttgaggtcaaagaataggtggccggtgcagtttgaaaaagtttcatagcgtttctaagtaattgcagctctcaatggccgagcgcggtggctcacgcctgtaatcccagtactttgggaggccgaggtgggtggatcacaaggtcaggagatcgagaccattctggctaacacagtgaaacctcgtctctactaaaaatacaaaaaaattagccaggtgtggtggcgggcacctgtagtcccagctactcaggaggctgagacaggagaatggcgtgaacccgggaggcggagcttgcagtgagcggagatcgcgccactgcactccagcctgggcgacagagagagactctgtctcaaaaaaaaagaaaaagaaaaagaaaaagaaattgcaactctccttcttgctgccccagtcacttgaatcacagttatacattttaaaaaagaaaactttttttcactttatttcttgataaaagaatctaacatggcactgtcttgaatcagcaccctactagtgattgtacagaaataaatgaaggaagaaaatctgtagggccttgggaacattctttggttcttggacaaaataattcttgtgcaaatggttacactaaagatttcttctatttaggatcctagaaagttaagagttagaaaaaacatgatatcatttagctcgatgaatccattttagagattagcaaatgaagttccagccaaaggaaataacttgttttaccgtgtgccagatatgactggtgactaagacagggcaagagtccagtttttctagttcaaaaacaattttgtacaggtcagaggagtctttctgagaaatatgctggtatatcagcaagttgctagtatctttccctgctcacttctctttttgaagtgttgggaagacttattttggcactagggcctgagagcatcatcttctcatccaatattgctctgttcacctgtaactcaggtttcagaaaatatgatcctcatgtttttcctgtacttgtattaactgcatcatactttatatcctaaagtaaaataagtcttcactttgataattggttgactacttgagatatttaatcccaaaagtctcctaaaggtttttgcctgttctgaatagcaacatgcaacacctccttataataatcctaaggcaataagagtccgaccaagtacaggaaagaagagggtgcagtcatagagagtctgaagacaaattataagataaaatcttgtgcatctcactgtttagtctcaatgtttagactccattaaattaatatgcaggaacatcgaaggggcatcaattgtagatggaaagttaaaggaccagacaaatgactgtgtgtatgcacatgagaatattacaggtttagttttgaagcctggctttgtccttgggctgctgtaggaccttgggcaaggatcttaagctccccaggtaagaaataaatgttagcacttattactataataataattattaaataatttgtactcaagaaagacagattgagaggttttctgacttcggtttaaatcctaaatctttactgtttgatgtcattgtagttaagtagatggtttccaggtgtgtgtgtgtgtgtgcatgtgtgtgtgtgtgcatgtgtgtgtgtgttttaaccaaagctttgctttgtaatgaatgacagcgtgctccttgtttacattgtttagaatggtgctaatatttattttagtgcctttaatattattttgttcaatcatttcctgaattaatatttgtttacaaggactgataattttatacctttgttcagaacgacagaaatctcaaaagttttacaacatctatacctacaggatgtcagattatccacccttagatataaatacatacacatacctgggtaggtatttccaggtgtgaaagcacaagtggagcattttggaaatctagttgacttggtcaggctattaggactgccattcaacccggaacaaagactcaacaattggtatttagtacacattaaagaatgcatgaaaaatgatcacctttatctttgattctcccttttcacctaaatgactacaatacccaactttatccagtgctatatgtctctcatacagacaagtctagccatgatttgacactggatttggactacaggacctgtgactttctaggcattgtacaaatactgaactagatttgtacatctacagattgaaagccaggatgtgataaagttctggttacaaatttacagaatggcgaagatacaaagaatagaagaagtcaaaacaaaacaaaacgaaatgaaaaagaccatctatctccttcagggatttcagccttcagatgtagaaattcaagctttgaacgatgaacagggaatgctggagaagcctgaaagggctgagtcttctattgataagacggataactaataagtataactttacttggtggtccacataagacattcatgaaactcactattccttactccaggtgatatcaacagcacagcagaaatacattcctattcttggagccatagagggagaggatgccttcttattgctcttttctgcctacttagaggttcttgtagtcttcctgagaatctgacacctttgagattctaacagaagcagctttccaaggctgtttccagaggtcaaccataattcagtgccagccttttgctttgcaattatattaagcctcaaaaaatgaaagttgggctattttaccctcctgtccagtctttgcaaattcttccagtggctcccctattgtccaactccttgtatggctgtcaaagcctttcacatctttcttttgctcatctcttatatatttggtggcattctttattgaccctgcactcaaccactctcagcctcttgcagttctgtcaactcatgatttcatacctgttttgtgctgtttctctctctcttttttattttaagttctagggtacatgtgcacaacgtgcaggtttgttacatatgtatacatgtgccatgttgtattgaccctgcactcaaccactctcagcctcttgcagttctgtcaactcatgatttcatacctgttttgtgctgtttcttttttttttttttaattttactttgagttctagggtacacgtgtacaacgtgcaggtttgttatatatgtatacatgtgccatgttggtgtgctgtacccattaactcatcatttacattaggtatatctcctaatgctatccctcccccctcccctcaccccacaacagaacccggtatgtgatgttccccaccttgtgtccaagtgttctcattgttcaattcccacctatgagtgacaacatgcggtgtttggttttttgtccttgcgatagtttgctgagaataatggtttccagcttcatccatgtccctacatgaactcatccttttttatggcttcatagtattccatggtgtatatgtgccacattttcttaatccggtctatcattgatggacattttggttggttccaagtctttgctattgtgaatagtgccacaataaacatacgtgtgcatgtgtctttatagcagcatgatttataatcctttgggtatatacccagtaatgggattgctgggtcaaatggtatttctagttctagatccttgaggaatcgccacactgtcttccacagtggttgagccagtttacggtgccaccaacagtgtaaaagtgttcctatttctccacatcctctccagcacctgttgtttcctgactttttaatgattgccattctaactggtgtgaaatggtatctcattgtggttttgatttgcatttctctgatggccagtgatgatgagcatttttaaatatgtctgttggctgcataagtgtcttcttttgagaagtgtctgttcatatccttcgcccacttgttgatggggttgttgttttcttgtaaatttgtttgagttctttgtagattctggattttagccatttgctaaatgagtagattgcaaaaattttctccgattctgaagattgcctgttgactctgatgatagtttcttttgctgtgcagaagctctttagtttaattagatcccatttgtcaattttggcttttgttgccattgcttttggtgttttagtcatgaagtccttgcccatgcctatgtcctgaatggtattgcctaggttttcttctagggtttttatggttttaggtctaacatttaagtctttaatccatcttgaattaattttggtataaggtgtaaggaagggatccagtttcagctttctacatatggctagccagttttcccagcaccatttatcaaatagggaatcctttccccatttcttgtttttgtcaagtttgtcaaagatcagatggttgcagatgtgtggtattatttctgagggctctgttctgttccattggtctatctttctgttttgataccagtaccatgctgttttggttactgtagccttgtagtatagtttgaaatcaggtagcatgatgcctccagctttgttcttttggcttaggattgacttggcaatgcgggctcttttttggttccatatgaactttaaagtagttttttccaattctgtgaagaaagtcattggtagcttgatggggatggcattgaatctataaattaccttgggcagtatggccattttcacgatatttattcttcctatccatgagcatggaatgttcttccatttgtttgtgtcctcttttatttcgttgaggaagttctggccagggcaatcaggcaggagaaagaaataaagggtattcaattaggaaaagaggaagtcaaattgtccctgtttgcagatgacatgattgcgtatttggaaaaccccattgtctcagcccaaaatctccttaagctgataagcaacttcagcaaagtctcagaatacaaaatcaatgtgcaaaaatcacaagcattcttatacaccaataacagacaaacagagagccaaatcatgagtgaactcccattcacaattgcttcaaagagaataaaatacctaggaatccaacttacaagggatgtgaaggacctcttcaaggagaactacaaaccactgtttgtgctgtttctctttagaaattctttcccacccatgttcatcaacttctagtcatttcttactctcagtgttagtgtgatcttccccagtaagtccttcccgcagaaggaaatgagtagtccctcttttggttctcttatggtcccaaaacatagaaccatcgcagcccctacaattgttaaccatatcatctttgtttatatgtttgtcttccctactatgctgtacctttcttgagtgaaagactaaatctatatccttttatagtagagtccgcagacaacatgaatcaaatttcttcagttccgccccaaacttattataaatcaagttatgtggagaggttgaagaaaatctcagaatctgcgttataacaattaccagataattttaatgcaaacgagttagagcaacactgaactatattgtttatttctctactcagtttgtctagcatagtgcttgcaatacttgtttgaatgaatgttaaatgaaagagaagatgaatggataagacatctcaagtatattcatatgtaatccctatgtgatgtggaggactccctgtccctttgtaaaattccctaattaaaatcagatctaactacaggtttcctgctccgtagaagtctaaagaccttgcctgtagtaacaattcttgagggcctctgctcttacagtctctaatgattaatttatgtgtcaacttgactagattaagggactcttttagatggtaaagcattatttctggatgtggctgtgagcatgtttccagaaaagattggcactagagtcagtggactgagtaaagaagatctgtcctctcccaatgtggacaggtacagtaaagtcagctgaaggcccacatagaacaaaacaacagaatgaaaggccagttcttgtttgtttgctttctttctctctttctctctctctttctttttctttctttctttctttttctttctttcttttttctttctttctttcctttctttttcttttcttttcctttctttctttctttctctttctttctttctttttctctctttctctttctttctctttccctctctctctctttctctttctccctctcccctctctctctcccctctcccctctctctcctggatttgggtcactgatattctcctgctcttgggcatcggaactccagattctcaggccttcagcctcagactgaaagctacacagttgccttccctggttctgaggccgagccatgctattggctaggctggttctccagcttgcagactatcacaggacttctcggcctccataattatgtgagccaattcctctaatgaatccctgctcatatatctacatcgatgtaatgtatatctctatatttgtatctgtatctatagctgcatctatatctatatctatccatatcctattggctctgtctctttagagacatggtccctgatgcttcccactctgttgttggtacaagtacattctgttttgctccacatcatctcagacacaaaaaatcaattattctatcagtttctatgagaaatacatttacatgtagcattttgtgtttagtagatttgctgaacattatggatgttatgggaaaggagtcacaccatggaaatcttttaatttcttctctcctgacaagattttatccttattaagcatagcttttatccttattaagcatagcttttaatctctcttcagtactcaccttgaaacatacccagttaaactcacctaaccaatgtcaactctagttgctcagtaaacaacataggctgtttcattgatcccccatcctaaggtaattgaaagttcattttttgttacagacttaattctttctttcacacttctacaccccctgcaggaatgatagagagaactttctttgaatcacgtggcttaattttccatgatgccctagagtaaacagaaggggtggttcagcaggtaaagagttaaactttgcaagattcacatatggagcagcttagccaaaagtccaagcttgggttctttgttggtaggaagaatgagggggaaaaagacaggaacatagcaaatccatgtcttgtctaacaggatgctgagccttctgttctatttccaactctcatttcttgcacactcctcaattgaattcttgtcaggttttccttgcatttggctgaacccggaaatccagatatgcacatcataagttgatgagtccagacgtttagtggaaattagtttactcgtcgctttgactgactctgtttaattcacaaggccagtaagccctggagtgccccagacacagaggtaatttgaaacacataaaggaaagctagccttgggttggattggttgtcatggtgatattgtgggccactgagatacctgcacttgaccatactatagggaaaaactattttcaaagcttaaagctaaactttttatcattctgtattactgttattattgttactttattcaatgaggcataagaaaacacattaggcagttatacagactggagtttaaatccatttctgctactcactaatctgtgactctggcaaactaacctacctatgcctcagtttttgcattttacaaagatgataacaataacatctagattattagatttaacgagggtttaataagataaatgcataaaaagcacatggcgggttgctaataaataactgactcctgttcctctccattgtccttgtcctctttagttctgagattattttatcaattaggcccatcattcatctatgaaagtttatgctcaggcatagagatatctaaggaggaggagtacacatgtatgtgtgtgtgtgtatgtacataaacatatatacaggaagcagagggattaccttttcctttgtttcaaaacatatttgaacacaatagaataatggtggttaggtggtcagttttatttattgtactgtgtgttgtttatagttttcaaaatgatttcatggctagtatttcattgattttacaataactctccaaattaggtaatgtagttgtttctgttttatagaaggagaacagagggtctcaatggctttcccaagttcattcttcaaggaagggatagaaagaactcaatgtatttctaaccagtgacacttactcacacttggatgcgagttgtgatattttttatttagtttagattaaacctagttcagttctccttccaccaaggttggcaggcagtacagcaacagtcatctttcaaggttgctttccctttctttggataaaacaaagactcctgagatagggtcatgacattttgccatagtggtcactaatgccattgccagttgcccaggcttcgtgatcttgagggcaggaagctcccttggtacaccattccctcctgcattagttcagacatgggaactgtttgcctgatctctcgaggcctttcctcagtggccactatcacagacttccacataggttatctattgctgtcaaacaaactaccccaaaacttgcttctgctgagatgactcaaatggctggagttggaacaatggggggcctggctgggcctctctctctgtccgtctcttttttcctgtctctatctgacttcttccttacatagctgtattgggctttcacacagcagaagcagcttccaggtaatcagggctctgggttccaaatatgttccaagaacaggtggtagaacatgtttctaaagtatgaacctaaaatttgagacatcactttctgttggtcaaagcagccccacaacttgcccagattcaagagaagaagtcatagatcataccactaggtgggaggagtgtccaaaaatttgcatcagtctttaatttgctataccatgtttctgagattctctgacctataggaaattacattccactttgcttagatgtctactcaccataaatgaggtatctttgaagcacatttatctttgaagaataatgccttcattttaacacctcatcctttgtctcatggtgaatgagatttaacctcttattaggaagtagctgataatcacatagctaggtgtcatttcctaaaactgcaaaaggttctctcacttctctgtgttggggctgtcagcaggagatgtttttatgtgttgtgataagtaaaatgattcttctaaattaggctcccatgcctcagcccagcaagacttaatcatctgagtttttatattgtgataatttttgttttaaatcctcttgttagatgtaagtattatgagtactgactgaatgaatgggtaaatgaatgaatgagagtaagcagtgctgaagggatgcacatctgtcttttctaacaagaatagcattaatttacagtgttaggtactaagtctcttgtctatgtcaacatggacctcaccctgtcctcaagctgcttatattttcatagtttactaatgtaaaacacgtaaaatcaggtgtgaggttctcaatgcagacttccaagaaatggcagctggctttgttttctctcctgtaataagactttaactgccaactcactgtgataatgaagtcattgttaattcttagatggtaatccctcaggcaaatctgtttaaagcactaatttctgagatagctcaaaacagacaacaaattctacttttcataaaaattcaatggaacactgagccaaaggcaggacagatgttgcccttatgaaatgatcagtggaagacttgctaaaagttcatttataggtaccttattttgtgtaacatgcttgttagtaatgctcggaatgtctcactaatgagctgtttcagttgtttctagatcttgagtggaaccgtgaaatctgcattcttaacaagctccttagaggattctgttgcacacgaatgtttgagacagtatattgaacatgcacactcatccacatatatattaaattggtgcaaaagtaattgctgttttgccatcactttcaatggcatcactttcagtcaggcaccaacctaatacatatatagttgcacaaataaatagatgccagtgttttccaaaaacatagaaaggggccaagggaaggtgaagtgggatagtgaaaggctgatggaggaaagaataatatctaactaacctgatcttctgactttaattttatcctctctctattccattttcctttatgccaggatacttttttaaactgcaaatctagtcacacacttttgcacagaatcttcaatagtgacagtttcttattacatgtggaaggaagtctaaataaccgatcatgtttatttattgggacacttcccaccttctgagacccatttttaaaattttttattttaatttttgtgggtacatagtaggtacatagtacatacatattttaatttatgtgggtacatagtattaaaataaaaattattttaatttttgtgggtacatatatatatatggggtccatgaaatgttttgatacaggcatgcaatgaacaataatcacataatagaaaatggggtagccatctcctcaagcacttatcctttatattacaaacaatccaattatactattttagttaaatgtacaattaagttaccattgactacagtcaccctattgtgctatataatagtaggtcttattctttctacgtttttcgtacccattaaccatccccatccccacctccccagcccccgactaccctttccagcctctagtaaccatccttctgctctctatgttcaattgttttgatttttagattccacaaataaatgagagcatgtgatatttgtcatggtgtatttaacttaatgtaatgatctccagtttcatccatgttgtttgcaaatgacaggatctcattcttttttatggccgaatagtacttcattgtgtatgtaccacattttctttatccattcatctggtgatggatacttaggttgcttctaaatcttagctattgtaaacagtgcttcaaaggcaggacaaaaataggagagcacatatgtctctgacatactaatttccttttttggggtacatacccagaagtgggattgctggattatatggtagctctatttttatttttttgaggaacctttaaactgttctccatagtggttgtactagcagcttacattcccaccaacaatgtacaaggcttcccttttctccacatccttgctaacttttgttattgcctatcttttgcatgtaagccattttaactgaggtgagatgatatctcactgtagttctgattcactctgatgatcaatgatgttgagcacctcttaatatgtctgtttaccatttgtatgtcttcttttgagaagtgtttattcagatcttttgcccgttttagatcagattattgtattttttcctatagagttatttgagctccttatatattctggctattaatcccttgtcagatgggtagtttcaaatatgttctctcattctatggattgtcacttcactttgttgattgtttcctttgctgtgcagaagttttggatgtgatccaatttgtccatttttactttggtcacctgtgcttgtggggtattactcaggacatttttgcccagaaaaatgtcctgcagattttgtctaatgttttcttgtagtagtttcagagtctgtggtcttagacttagttatttaatccattttttgatttttgtatgtggtgagataaaggagtctatctgcatatggatatccagttgtcccagcgccatttattgaagagaccatcctatccccagtgtatattcatgctacctttgtcaaaagtgagttcactgtaggtgtgtggatttgtttctgggttctctattctgttccattggtgtatgtgtctgtttttatgccagtaccatactgtttttgttgccatagccctgtagtataatttgaagtcaggtaatatgattcctccaggtttgttcttttttcttagcacagctttggctattctgggtcttttgtggttccatagaaattttaggattgctttttctatttctgtgaagaatttcattggtattttgatagaaactgcatagaatctatagattgctttgtgtaatatgaacattttaacaacattgattcttctaatcaatatgggatattttcatattttttggtgtcctcttcaatttctttcatgagtgttttatagttcacattacagagatctttcacttatttgaataaaattatttgatatttaatttaatttgtggctattacaaattagattacttttttattacttttccagattgtttatatttttaatacagaaatgctactgatttttgtatgttgattttttttttattttattattattatactttaagttttagggtacatgtacacaatgtgcaggttaggtacatatgtatacatgtgccatgctggtgtgctgcacccattaactcgtcatttagcattaggtatatctcctaatgctatcccccctccccccaccccacaacagtccccagagtgtgatattccccttcctgtgtccatgtgttctcactgttcaattcccacctatgagtgagaacatgcggtgtttggttttttgtccttgtggtagtttactgagaatgatgatttccaatttcatccatgtccctacaaaggacatgaactcatcattttttatggctgcatagtattccatggtgtatgttgattttgtatcctgcaactttactgaatttgtttgagttctaatagttcgtctgtataatctttaggatttttcaaatataagatcatatcatctgtacacaaggataatttgacttcttttattctaatatggatgccctttatatctttctcttgtctgattgctctagccaagactttaagtactattttgaataacagtggtaacagtgggcatgttccagatcttagaggaaaggctttcatttcctccctatacagtatgatactagctgtaggtctgtcatatatggcttttattatattgaggtatgttccctctataaccacttttttagtatttttattaggaagggatattgaattttaccaaatgttttttcttcattgattgaaatgatcacatagtttctgtccttcattctgttgatgtaatgtatcacattgattgatttgcatatgttgaagtatccttgcatctcagggataaatcccactttgtcacgataaatgagcaaatgtattgttggattcactattgaggatttttgcatcaatagtcttcagagatattggcctgtagttttctttttttcttttttgttttgatgtgtctttgattttggtatcagggtaatactggcctcatataattagtttggaagtattccctccttctctattttttggaatagtttgagtaggatttgcattagttcttatttaaatgtttggtagaattcaggaatgaagcctctggatcccaggcttttttttacaggaaaactttttattatggcttcaatctcattacttgttaatggtcagttcaagatgcatcataagatggtttacttgatgggcacttataggtattcattttttttcttaattattttattttattttattaaactttaagttctgggatacatgtgcagaacatgtaggtttgttacatacgtatacatgtgccatggtggtttgctgcacccattaacccgtcatctacattaggtagttctcctaatgctatcgctgccctagcccccaccccgtgacaggcccaggtgtgtgatgtttccctccctgtgtccatgtgttctcattgttcaactcccacttatgagtgagaacatgcagtgtttggttgtctgttcttgtgttagtttgctgagaatgatggtttccggtttcatccatgtccctgcaaaggacatgcaaaaggatgaactcatccttttttatggctgcatagtattccatggtgtatatgtgccacattttctttatccagtctatcattgatgggcatttgggttgattccaagtctttgctattgtgaatagtgctgcagtaaacatatgtgtgcatgtgtctttatagtagtatgatttagaatcctttgggtatatacctagtaatgggattgctgggtcaaatgacatttttggttgtagatccttaaggaatcgccacactgtcttccacaatggttgaactaatttacactcccaccaacagtgtaaaaacattcctatttctccacatcttctccagcatctgtttcctgacttttgtttgtttgtttttggtttttggtttttttttttttttgagacagagtctcgctctgtcgcccaggctggagtgcagtgatgcaatctcggttcactgcaacctctgcctcctggggttcacgccattctcctgcctcagcctcccaagtagctgggactacaggcacctgccaccatgcctggctaatttttttttttttttgtattattagtacagatggggtttcaccgtgttaaccaggatggtctcgatctcctgacctcatgatctgcctgccttggcctcccaaagtgctgggattacaggcttgagccactgcacctgaccgtttcctgactttttaatgatcgccattctaactggtgtgagatggtatctcattgtggttttgatttgcatttctctaacgaccagtgatgatgagccttttttgtcatgtttgttggccacataaatgtcttcttttgagaggtgtgtgttcatatccttcacccactttttgatgggcttgttttttttcttgtacatttgtttaagttctttgtaggttctggataatagccctttgtccgacgaatagattgcaaaaattttctcccattctgtaggttcccttttcactctgatgatagtttcttttgctgtacagaagctctttacctcttttgctctatctcacaggttttggtatgttgtgtttccattatcatttgttttaagaaattgttcaatttctttcttaatttcttcattgactcactggtcattcaggaatgtattgtttaatttccatgtatttacatagtttccaaaattcctcttattactgattttgagttttattccactgtggtcagagaaggtgcttgatattacttcagtttttttcattgtttgaagacttgttttgtgacctaacatatggcctatccatgagaataactcatgtgctgaggaaaagaatgtgtattctgcagttgttagatgaaatgctctgtaaatatctagtagatccattcggtatacagtgcagattaaatctgatttttttgttgttgttgatcttttgttgggaagatctgtccagtgctgaaagtgaggtgctgaagtctccaactattattgtattggggcctatctctccctttagctctaataatatttgctttatatatttgggcacaactgttttgggtgcatatatatttaaaattattatatcatcttcattaattgactcatttttcattacatagtgaccttctttgtctcttcctatagtttttgtcttgtaatctattttgtctgatataaatgtagctactcctgctccttttttgatttctgttgccatggaatatatttttccatttctttgttttcagtctatgtgtgtacttacatgtgaagtgtgtttcttgtagacaacagatcaatgggccttgttttttaaatccattcactcagtctgtttcttttgattggagagattagtccatttatattcaatgttattgttggtaagtaaggacttactcttgccatttcaatatttattttctggttgttttgtggtcccctcttccttcttcctttcttttctgtcttcctttagtgaatgtaattttctctggtgatacaatttagtttgctttttagtttttgtgttgtatggtttttgatttgaggttactacgaaccttgcaggtatcatcttataatccattattttaagttgataataaatgaacactgtataaacaaacacacaaaaacaaacccaataaaaactctgtcttaactttgttcccctgcttttcaactttttgttgtttctatttatatcttatggtactgtctgtgtcttaaaaagttgtagatattatttttggtccgttcatcatttagcttttctatttataagaagagtagtttacataccacagttacagggctatagtattttgggtttttctgtgtatccagcacagtactgggtctcatccaaggcctgatataaccactccctattaccagtgagtgttttaccttcaggtgattacttattgctctttagtgtcttttctttagcatttcttgtagcacaagtcaagtgttgatgaaattcctcagcttttatctgggaatgtctttatttctccttcatgtttgaaggatatacagttctagggtaaaatatttttccttcagcaccttaaatacgtcatgcctctctctcggcctgtaaggtttccactgaaaagtctgctgccagaagtattggagttccattgtatgttatttgtttcttttctcttgctgcttttgggatcctttctttattcttgacctttggtaatttgattattaaatgagttgaggtagtcttctttgggttaaatctgctggccattctataaccttcttgtatttggatatcaatatctttctttaggtttgaaaaattctttgttattatctctttcaataagctttctacccccatctctttttctatctcctctttaaggccaataactcttagatttgcccatctgaggctattttctagatgtaggcatgcttcattttttttttttttactcttttttcatttgtctcctctgactgtgtattttcaaatagtctgtcttcaggctcactaattctttcttgtttgatcaattctgctattaaaatattttgatgctttactcaatatgccaattgcacttttcagctccagaatttctgctgattttttaaacttatttcaatctctttggtaaatttatgtgatagaattgtgacttatttctctgtgctatcttgaattcctttgagtttcctgaacattactattttggattcctgaacattactatatttggacaatttattagggccctagggcactttagcctacagtggtgaggtttgcacaaactcaagctccaaccactgggatctcagtttcctgtctggctagggctggctgaaatgctccctctgtgtgcaaggtgggtggggggtgacagctgagtttggtccggttttcctttctgctatgacaggacagcactgagtttaatgcttcactattgctgtgtgcgccctctgccagccacagaaattctccctgcaccatgtcaccactccggggggtcatgaggggtggcataagtgattcaagattgtatttttctgcctcttcagtgcctgtttcagtgatatgaagttaataccagaactgtgagtgctcaccagatttttatttcttatgaaggtccttgtcttgtgtagatagtctttaaattggtgtccttgggcaggaggagggggaactatctgtggagacttctattccaccatcttgctctgtgtttccagacccatttattaatttctcccttcatcttctactctggccatacttgtctgcttgccatttgctaaccaaccctcatatttctacatttctgtgctttgctttgagctttcttcctggaatgctcttctttcactctagattaagaaatatttatacttcagtactaagctaaattttgttatttactgacactacctaacattttaagagataaacttaaaaaaatctactcacaggtctatatgcagttttgggggataaattttgatgctcactcgttatgctaggagattactagaagacaatgtcattggaaactatatggcctaggagagttgcactgggattccttagccatcaaatttgctcatggttaatatctattttaagtaaatgtaagacagagctttttcatttttgctttataatatagactttaagagcctcagattgtgcatttaaattttaaacaggtaaatcttcaattttttttttctggaaacaacgttgcttttcattcacacaaaccacttcaatgcattttcattgcattgataatcaggaatttctattatttttcctcaatatatcattataaaaattgtggaacatcttgaaaagttgaaataattatacagtggacacccatacacttaccatgtaaatgttacaaatgttaacattttgttacatttgctttgtctcgtattcatccttctatcttcccatctgcccatctactgatccatcgtaattttcaagcatctcaaagcaagttacaaatatcagtatgctttagttccttttccttcttttaaaaataatgtatttttaattaacaaataataattacatatatatatgcagcacaatgtgatgttttgatctatgtatacattgtagaaatattcagtcaagctaattagtatatccatcacctcaacaacttctccacgtcctcaccagcacttgttatcgtttgttttttttgatgataactgttctaacaggtgtaaaataatattctgttgtggtctgtattagtctgttctcatgctgctaataaagacataccttacactgggtaatttgtaaaggaaagaatttaattgactcacagttccacatggctgaggaggcctaatgatcatggtggaagtacaagagatgtcttacatggcagcaggccagaaagagcttgtgcaggggtactatgctttataaagccatcaaatctcatgagacttattcactatcaaaagaacagcacgggaaccacctgcccccatgattcaattacctcccattgggtcccgcccacaacatgtaggaattgtgggagctacaattcaagatgagatttgggtggggacagagccaaaccatattatggtcttaaatttgcatttttctgatgattggagatgttgaatatctcttggtcattcatatctcttctgttgagaaatgtcttttcagaccatttgcccagtattaatcttggttatttgttttcttgcttttgagttgtgtgagtttcttatttgtgatattaatcccttatcagatacatggtttgaaaatattttcttccaaccggtgttctgtctctttaccctgttatttatttcctttactatgcagacactttttggtttgatacaatcctatacgtatatttttgcttttgttgcctgtgcttttggagttctatgcaataaatcacatggtaggcaacaaaagactttcctttcttaaaacagaatgttaagccttcaatctgaaagcttggccatttaagcacatacatttcttttcagtattcaagcatgtaatatctaaactataatcttaaagtgcacatggtttgtttcctgtcaaaagcatggttaagccgaataacatttgagtgagctcacctatttctctggtttctcacaaaattctcctatcaggtcacatcatcagaaagcaaagcatttttaatattgctagcttaggtatcatagaaattatacaagaaaagtgatttgatactatgccattactatttatatgaggccaatagaaaaaactttctgggtaacctgtgtttttcagtttttgtataacaattaaagacagtttctttaacatgacttattacccttaacctaagagtcaagagatgctgtctggcttgaatgaataagtaactgatgcttggagagataatttttagagttggagagttgctcagtggaggagtgagaatagtgacacagaagtggaggaaaagaaggtgggggtaaagtatgtaagttgataatacatattagaatgttatttagcactttgaaatgaacaaccagaagcaatcaatataaaaatagttaaaacatataggaatttcctgggagctagacaggacaggagaggtttgtggcaggaaacttgatttttactacaagtcttcctttaataatagtagtaatcatcattttcatcatcatcatgacactcatagtgcttattacatgccaagcactattctaagctctttatatttgtattacattttttctcaaattttgcgttacattcatttaatttccatttaatctttttttttttttttgattttttggagatggagtctcgctttgtcgcccgggctggaatacagtggtgcaatctcagctcactgcaacctctgcctgccagattcaagcaattctcctgcctcagcctcctgagtagctgggactacaggtgcgtgccaccacgcctggctaatttttttattttttttaatttttattagtaactgggtttcaccatgttggtcaggctggtcttgtgctcctgacctgatgatccaccagccttggcctcccaaagtgctgggattacaggtgtgagccgccacacccggcctattttccatttaatctttatagaggctctatgtggtagatgtttttaccaccatataacagatgtgaaaactgagtctcagagcaagattggagtcttttaactcaagaagtgtattctgaagctcatgctcttcactgtcacatcttgataattccttgctaaaggaaaaatgtttccataagataatttaattttagtctttagtgccagcaaaactttcttctaaaggttttataagctttcttttatcagacaggaaaacttgtgtacattattatgtaaagccccctttcctgttttgctttgggaacctaggcttcaatatattgctcaaatattataatttttttttcccctgagatggagtctcgctctgtcacccaggctggagtgcagtggtgcgatctcagttcactgcaatctccaccttccaggttcaagtgattctcctgcctcagcctcctgagtagctgggactacaggcgcgaaccaccatgcctggctaatttttgtatttttagtagagacagggtttcactatgttggccaagctggtcttgaactcctgacctcgtgatccgcccgcctcagcctcccaaagtgctgggattacaggcgatagccaccacacctggcctgtaattatttttctcttgttttcatttctgatcttagttttagctttacctttacctctgttcatgtattcaaaatattcaaggtaaataaacaagtaaacagacaaatgtgacaatacattattcctttgctcacttgtttgcttctactctgatgattttattttaaactctgtacctgtcataatttctggcattgttatgacttctgtaagaatgctccctgagtgttcttaatattccaaatagctataaagctattcactaataaaaattcatgtggtgttgaggatgcaaagtgaaaatcttttttttattatactttaagttctagggtacacgtgcacaacgtgcaggtttgttacataggtatacatgtgccatgttggtttgctgcacccattaactcgtcatttacattaggtgtttctcctaatgctatccatccccctgcccgtcaccccatgacaggcccctgtgtgtgatgttccctgccctgtgtccaagtgttctcattgttcaattcccacctatgagcgagaacatgtttggttttctgtccttgtgatagtttgctcagagtgatggtttccagcttcatccatgtcctgcaaagaatatgaactcatccatttttatggcttcatagtattccatggtgtatatgtgccacattttcttaatccagtctagcattgatggacatttaggttggttccaagtttttgctattgtgaatagtgctgcaataaacatacgtgtgcatgtgtctttattgtagcatgatttataatcctttgggcatatacccagtaatgggattgctaggtcaaatggtatttctagttctagatccttgaggaatcaccacactgtcttccacaattgttgaactagtttacactcccaccaacagtgtaaaagcattcttatttttccacatcctctccagcacctgttgtttcctgactttttaatgatcaccattctacctggtgtgagatggtatctcattgtggttttgatttgcatttctctgatgaccagtgatgatgagcattttttcatgtttctgttggctgcataaatgtcttcttttgagaagtgtctgttcatatcctttgcccactttttgatggggttgtttgctttttacttgtaaatttgtttgagttctttgtagattctggatattagccctttgttaaatgagtagattgcaaaaattttctcccattctgtaggttgcctgttcactctgatagtagtttcttttgctgtgcagaagctctttagtttaattagatcccatttgtcaattttggcttttgttgccattgcttttggtgttttagtcatgaagtccttgcctatgcgtatgtcctgaatggtattacctaggttttcttctagggtttttatggttttaggtctaacatttaagtccttaacccatcttgaattaatttttgtataaggtaaaaggaagggatccagtttcagctttctgcatatggctagccagttttcccagcaccatttatcaaatagagaatcctttccccatttcttgtttttgtcaggtttgtcaaagttcagatggttgtagatgtgtcatgttatttctgaggcctctgttctgttcaattggtctatctgtctgttttgataccagtaccatgctgttttggttactgtagccttgtcgtatagtttgaagtcaggtagcgtgatgcctccagttttgttcttttggcttaggattgtcctggcaatgtcgtctcttttttggttccatatgaactttaaagtagttttttccaattctgtgaagaaagtcataggtagcttgatggggatggcattgaatctataaattaccttgggcagtatggccattttcacgatattaattcttcctatccatgagcatggaatgttcttccatttgtttgtgtcctcttttatttcgttgagcagcggtttgtagttcttcttgaagaggtccttcacatcccttgtaagttggattcttaggcattttattctctttgaggcaattgtgaatgggagttcactcatgatttggctctctgtttgtctgttattggtatataggaatgcttgtgatttttgcacattgattttgtatcctgagactttgctgaagttgcttatcagcttaaggagattttgggctgagacgatggggttttctaaatatacaatcatgtcatctgcaaacagggacaatttgacttcctcttttcctaattgaataccctttatttctttctcctgcctgattgccctggccagaacttccaacactatgttgaataggagtggtgagagagggcgtccctgtcttgtgccacttttcaaagggaatgctgcataaataactcttattattttgagatacgttccatcaatacctaatttattgagagtttttagcatgaagcgctgttgaattttgtccaaggccttttctgcatctattgagatatcatgtggtttttgtctttggttctgtttaggtcacagattacgtttagtggtttgtgtatgttgaaccagacttgcatcccagggatgaagccgacttgatcctggtggataagctttttgatgtgctgctggatttggtttgccagtattttaccgaggattttctcattgatattcatcagtgatattggtctaaaattctctttttttgttgtgtctctgccaggctttggtatcaggattatgctggcctcataaaatgagttagggaggattccctctttttctatttattggaatactttcagaaggaatggtaccagctcctctttgtacctctagtagaatttggctgcgaatctgtctggtcctggacttttttgttgttgttaggctattaattattgcatcaatttcagagcctgttattcgtctattcagagattcaacttcttcctggtttagtcttgggagggtgtatgtgtccaggaatttatccatttcttctagattttctagtttatttgtgtagaggtatttatagtattctctgatggtagtttgtatttctgtgagataggtggtgatattccctttatcattttttattgcatctatttgattcttctctcttttcttctttattaatcttgctagcagtctatcaattttgttgatcatttcaaaaaatcggctcctggattcattgattttttgaagtgttttttatgtctctatctccttcagttctgctctggtttagttatttcttgccttccgctaggttttgaatttgtttgctcttgcttctctagttcttttaattgtgatgttaggtgtcaattttagatctttcctgctttctcttgtgggcatttagtgctataaatttccctctacacactgctttaaatgtgtcccagatattgtggtacagtgtgtctttgctctcattggtttcaaataacatctttatttctgccttcatttcgttatttacccagtagtcattcaggagcacgttgtttactttccatgtagttgtgtggttttgagtgagttacttaatcctgagttctaatttgattgcactgtggtctgacagacagtttgttgtgatttctgttcttttatatttgctgaggagtgctttacttccaactacgtggtcaattttggaataagtgcaatgtggtgctgagaagactgtatattctgttgatttggggtggagagttctgtagatgtctattaggtccgcttggtgcagagctgagttcaagtcctggatatcgtttttaaccttctgtctcattgatctgtgtaatattgacagtgggctgttaaagtctaccattattactatgtgggagtctaagtctctttgtaggtctctaaggacctgctttatgaatctgggtgctcctgtattgggtgcctatatatttaggatagttagctcttcttgttgaattgatccctttactattatgtaatggccttctttgtcccttttgatctttgttggtttaaaatctgttttatcagagacgaggattgcaaccactgccttttttactttccattttctttgtagatcttcctctatccctttattttgagcctatgtgtgtctctgcacgtgagatgggtttcctgaatacagcacactgatgggtcttgactctttatccaatttgccagtctgtgtcttttaattggggcatttagcccatttacatttaaggttaatattgttatgtgtgaatttgatcctgtcattatgatgttagctggttattttgcccattagttgatggagtttcttcctagcatcgatggtctttacaatttggcatgtttttgcagtggctggtaccggttgttcctttccatgtttagtgcttccttcaggagctcttgtaaggcaggcctggtggtgacaaaatctctcagcatttgcttgtctgtaaagtattttatttctccttcacttatgaagcctagtttggctggatatgaaattctggattgaaaattattttctttaagaatgctgaatattggtccccactctcttctggcttgtagtgtttctgctgagagatctgctgttagtctgatgggcttcccttcatgggtaaccagacctttctctctggctgcctttaacattttttccttcatttcaaccttggtgaatctgacaattatgggtcttggggttgttcttcttgaggagtatctttgtggtgttctctgtatgtcctgaatttgaatgttggcctgccttgctaggttggggaagttctcctggataatatcctgaagtgttttccagcttggttccattctccctgtcactttcaggtacaccaaacaaacatagatttggtcttttcatacagtcccacatttcttggcagctttgctctttctttttactcttttttctctaaacttctcttttcactttatttcattaatttgatctttaatcactgataccctttcttccacttgactgagttggctattgaagcttgtacacgcgtcacgtagttcttgtgccatggttttcagctccatcaggtcatttaagatcttctctatgctgtttattctagttagccattcttctagtcttttttcaaggtttttagcttccttgcgatgggttcgaacatcctcctttagctcagagaagtttgttattaccgaccttctgaagcctacttctgtcagtttgtcaaagtcattctccatccagctttgtttcgttgctagcgaggagctgtgatcttttggaggagaagaagcgctctggttttcagagttttcagcttttctgctctggtttctccccatctttgtggttttttctacatttggtctttgatgctggtgacctacccatggggttttggtgtggatgtcctttttgttgaagttgatgctattcctttctttctgtttgttagttttccttctaagagtcaggtccctcagctgcaggtctgttggagtttgctggagttccactccagaccctgtttgcctgggtgtcaccagcggaggctgcagaacagcaaatattgcagaacagcaaatattgctgcctgatccttcctctggaagcttcgtcccggaggggcacccacctgtatgaggtgtcagtcagctcctcctgggaggtgtctcctagttaggctacacaggggtcagggacccacttgaggaggcagtctgtctgtcctcagagctcaaacactgtgctgggagaaccactgctctcttcagagctgtcagacagggacgtttaagtctgcagaagtttctgctgccttttcttcagctatgccctgcccccagggcgtggggtctacagaggcagcaggccttgcagagctttacaaaaaaatacagaagttatccaggagtggtggtatatgcctgtaggccagctacttggaaggctgaggtgggaggatcacttaagccctagaggtcaaggctgcagtgagccacgatcatgccactgtactacaccccaggtgacacagtaaaaccctgtctcaaaaattaaaaaaagaaatcattttattaaaaaaggttttacaaattcttcttaaggagtatattttgccttaaagtatggtctcttccccctgtccctgaggattgatgaatattttagtctctggacaaaggctatgaaaatgattatattcaagccaagaaaaccaaaagctgctgaacatatagtgcagccacaatttatctcaaacaatcaaaagagaagtctcctgttcttgctgcagtaccagttcccagtggagttgaaatatgagatgtgagcaactatgcccgatgtcatagggtgtttgtaccatagctagtaatatcatgctgctgtctctagcatattaaaaggaaaaaacctcagaactgaaaatataaaataaaaaaaagtttaagctgagattattgttaaagcaattagttactttaagaaagcaatgctggttggtaaaattaaccaattgagcataatttaggctataaaattaaatggccatgactaagctatagaaaagtttagttttggcttgtgtgttataaggagaggggaataaaaggaactgactttggttaaatttctactccaagtttctcttttgcaatttatttccttttaacttaaacacacttttgtaaaatatatgttgattattcccactttatagtttaagagaccaacaaagagaagtgaaataactaagtatgttcagaaagggagtggtagaaccaagattctatctgaagtgtcattctgaagccaaacatcttccatctatattaagcatatgagtaggactagtttagccctaaaatgattatatataaatcttatataattggcttgcccagactagcaattataaaaataaaatactataaacaacctggtgaacatgatgtagacatgagattgaaaacatttctattaactttataaacttaaccagggaagaagagaggtaagaattgaaaataaattgccgattcagcacattcagcaataatcattaggtcagcttgctctgattcactttttcatagctatttgctgccaattatgtagaccttgtcacaagattatagttccccttaactcctctgtagacaacagcattatgaaatgttatgccttccatctgagatattcgttcaggtcctgtatactagcaaaactactgatgtcagctggtctgaagtatccaacaaggagctgactcactaaagaatgaagtttctatatcctgatgatttaatcccttttaccctgaccaataaatgacccgttgtccagcccctcatccacattccccctaaaaacgtcagctctggactcctcaggtctaaggatatgagggccttttcctgtctctctgcttggttaccctgagatcattaaacttattctctgctgcaaaccctgctgtctcagtgtattggtatgtcactgtgcagcaggcatatgaacctgttggttctataacaagctgctgattgaagtagtgattatgttggtttaagcacttggtttaccaactccaacaatggagaaaatggctatcatgtactaacctatgttttgtagatgaagggccaagaggcattagtttttgtgggttcctatagaataagaaatttagattttattctaaagtcaaaggaatttcagagccttggaaattaatcaatcaatgaatttaagtttattaagtgttaaaatatagaataaataatatttgagttatatttaaaagaataaaaaaggctcaatttggctatagtgtagagaagatatagatacggtggggcaagaatagaagcagagtgatgagttatgtggttattgccatagaccaaatttcaggtggtaatggggtacattatggtagaaggagtaaaactggagagaaatatgtatttttggtatatattgtggacatgtagaatgaaaaaatgaattaattataggggtgatggaatgatagcaaaaggaaagagttagagattaacttttctatttttgttttgcagttcactgagatggaaaacttgggattggaacaaatttggggatataaactgggactttaattttggatgcaatgaatacactattgattcccaagtgacatataaaaaataacttgagctagttaaacaaatgtaaaggacaataaaatttcattgtctcatacatgtacaaacatgtccaagccagtgccagaaaattcatgaattaaagtttccactgaaatgtctatgagcagttcttatgttttaagttaaatatgatgctctgattaactttgcaagcatcagaaagtggttactccttggaaaacttcatgtttcaccttacagttaagaagaaagcatttttattaaagtagatttttaaatttttcattcatttattattacttcaccccatggggtctataaagtggatttttttaaacataaataattttatttgctcctaaaagaaaaaataattcaggaatttctcaatgcatgggatataaattgcatctacaatggaactaatttttctccacctgtataaaacattatttattgcagtggcttaaatgtatttgttgaatgaatggccatttgcatatcaggtcttttcaattaggctgtaagcttttgataatagaaacaattcatgtcttatgcttcttgaaatccacccagttactaggaacatggcataataaaaagaattgagatttgggattacagaagatatggatgtgaattacagtactactgcttatttttgtttgaatttgagcaaggtaaccttgatacatttatatttttttcacctgtaaaccataataatacctattttcatactgttgccatgaggattaaatcacgtttagaaaaagcctaacagttcttggcatatattggagtctccagtaaatgttagtctcccttccctaagcatggttttatggaaagactcagtaaatatttctcaagtaaatgaatgacattttctttggaatatcatttaccattaattcctaatgaattctgcattttgggtcaaaaggacactctatcaacccattcctatttggtgttaacagccatagagtgtcacagatcacaaaaccatacttaatgtttgttgctattctcaatcagtacagctgaacccacacctacagaacataattgagtcagattaattttaataactgaaatgtgaacattagcattcttggaaatgggaataaaattctttccatcacaagttaaattactactgcgttcataaattttaaaacagctgaccctgaatttccaccagcatcttttaaaatgatgtttctatcttcgcattattcatttaataaatgcttaggcagactttcatgtaagcgtgtacttagaagaatgaagtacaattagaagtcagctgagagaaaatagtaaatagttctcatagtactatttacactaataatacttgaattggaagtgagaaatcagaggagctcaacatcttgtttgccttaaatactgtctttgacactattttgtataattattctccccttgaagtactaatttataggaacctttgttactaagtactataacataatgttcatatcatttaaactctagacaatgagcaagaatttgagaattttctgttaataaatacatagattttaaaaatttacaactattgttgagcatttcaagatctttctcagtaataaaataagtaaagtattttaaaaatagaagttttcaataatcaacaattcgatctcgttgatatctatagaatgctctaattaatggagaatgtaataatatacattattttcaagtactagtcaaaccctgaccaagacaggccacattcaaggccataaaacacatctcaataattacaaaaaacagaaataatgcatactatgttctttgatcataatatagctaaaataaaaatgaatagaaaattatctgcaaaaaaatcccaaatatttgaaaatttaaacaacttccttttaaataggtcataggacaacacacacacatgcacacacacatgaaaatttagacaatgttttgaattgataaaaaatgataacaatatataaaaatctgtgggatccagctaaaatagtgtttagagaactgttgtatagcatcaaatgcttatattagacaagaaaaatggtcttgaataagtgactgaactaggcttccaatttaagaaactagaaaaaaataagcaaaatgaaacaaatggtaataataataaataacataattcaacaaaatagaaaccagaaaaagaaaatcaatagaatcaaatgttgcttcttcgaaaaatatcaacataattgacagaacttcagctagattgatgaggaacagaagacaggtattatttaactatataaaagacaaaggacataactgcagactctacagacattaaaataataaagatttattataaactttatgccaataaatcaacaactttgagcaactgtagaaattctgtaaaagacaaaaattatcaaaatgcattaaagaagagttagataacctgaaggggcacatgtatttgagaaattgattttgtagttaaaacttttctaccaagataattccagatacaggtggctttactggtgaatattagcaagtattttaggaagaaggggtcctagttttgcatgaaaatcttccagagtatagcagaggaacaaactgtaactaactcattttgtgagtccagaccaggcaaagaatttacaacaaaaatcacctctacagagccctcttgatgacaggtgcaaaaatcctccacagaatgttagcacttcaaacttagcaatacatattatattgaaaaagaatcatcatgaccatgtgaagtttatcttgggaatgcaagactaatttaatgttttaaaatcattcaatataattcacaatattaacagactaaagaagaaacaatacatggtcatctcaatagttacagaaaaacatttgataaaagttgatatacattcatgacaaaaattctcagtaaactagaaatagggaaaagttattcaacctaataaagggcatctaggtcctatacagtgcaataaggcaatttaaaaactcagggtaagaatatgcagtattggcacaaaaatatatagatgaatggacatggatagaaaatccattaatggacccaaactaatatggcgagttgattttcagaaaaaaacactaaggcaattgaatgtggaaaggatgacagttcaataaattatgtgagctaaatttttaaaacgtcaggtttagacaaaggtatcttaagtaggaaacaaaaagtgtaaacataaatactcaattttttatcatcaaaattaaaatctttgctctttaaaatattgttaaggaaatgaaaatacaagctatagcctgggagaaaataatttttgaaagctatatttgattaagagcttgtatccaggacatatgaagaactctcacaattaaataatgagacaaaatcccaaatgagggaaagggtttgaataggtacttcaaaaagaagatacatacatagcaaataagaccataaaaatatggtgaacaacattagtcattaggaagatagaaattgaaaccactacacattccctagaatgactaaaattaccaacactgacaatcctgtgtcttagtaaagatcgaaagcaactgtgactttcatttattgttgatgataaaaatggtgagatgcttttaggaaaccatttggcaatttcttctaaaggtaattatacacttatcatatgacccagcaatcctgctcctggatatttactacagagatttaaaaacatggctacacagatgattgtacaggaatgttcatagacattttatgaattatagctaaaaactaggatgaatgcaaatatctattaactaatgaatagataaaaactggtggtatattcacaatgaaaaataatggaataaaccaatgatatagcaatataatggaataaactaatgatacatgtacaacagaaaattttaaaaatattatgttgataaataaaaacttatgttcacacaaaaatttatgcacaaatgtttacaacagctttatttgtagtagccccaaactagaaacaaccaaatgcccttcaatgggtaaatggttaaacaaactgtggtagattgatatatggaatattactcagcaatgaatgaactattgatctgtaggtcaacttaaatggatttcaaagaagtcttattgaattttttaaaaaaaccctcaaaacatttcatactgtatgatttactgtgtgacattcttgaaatgacattatagagatgtagaaaggagcagtgggtgccagaagttggaggggagtggcaggaaggtggtagctctggctgtaaaagggtagcatgaaggatctgtggtatggaactattctgtaccttgatgtggcaaaggtcatttgaatctatacatgtgataaaatgcatagaactagacacacacacacacacacacacacacacaaatgcacataaacctagtgaaaattgaaaatgatggattttaatggatgtttatttcaaggtcatgctattgtactagagttatgcaagatagggggaggtgggtaatgggtatatggaatctctatgatttcctaacagctgcatgtgaacctaaaattagatcaaaataaaaagtaaaataatatgttgaatggaaaaaaagccagacacaaaacctcatatactgcatgattcagtttatatgaaattctaataaaggcaaactacagttatagaaaacaaataagtgatttccagcatccagagagtggaggaagggcattgaacactaagtgacaaaagcaaatgttccagatggtgattgttacatgactttttacatttatcaaaactcaccaaattgtatacttataactggcatattttgttctgtgtaattatgcctcagtgcatattacagaattttaaaagtggatgtcagtaatgtagtaaggtatagtgtaagtatattgatattatatttccaaaaaaataaaattattgttaaaagataccattcaggccgggcgtggtgactcacacctgtaatcccagcacttagggaggccaaggccagtggatcatgaggtcaggagatcgagaccatcctggccaacatggtgaaacccatctctactaaaaatacaaaaactagccaggcatggtggcatgcgcctgtagtcccagctactcaggaggctgaggcaggagaatcgcttgaacctgggaggcagaggttgcagtgagccaagatcgcaccactgcactccagcctgggtgacagagtgagactctgtctcaaaaaaaaaaaaaaaatgcccttcaaagcagtaagattagaaattataaaagaataaatttaagaattgcatggagattataaagccataaagacactgaaagaaccaaaaaaatttaaatatatgcctagacatatatgtaattcaaggaaaaaattcaatattctaactatgtaaattcttccccaatttctcagtaaacgtagtactagttatcacaataagatttatttttatattactctccataaaatatgaaaaacattccaaaatatttagccagaaaaagagtgtataacacaaaaaataaagtgtaagagaggaggacatattcttcaaagtgttaaaagtatattgtcaaactgtagtaattaatatattatgagactgataccagaatagattagcagcagatcaagggaaaagaataaaacgttcagaaatggcttgaaacacattttagaaatttggacataataataaagcatcagatcagtaggggtaactagtatggaacaaatcactaattatttgaataacattaaattagatttctatgttacatctcacaaaaataaatttctgacaacatacttttttatatttagccacttaaaattttctaaaatttggttgcttttgtagggtacattgtagcttctattttctgtccctattcctattttctacaataagctctattctattgagttatctactcgatccccacctccagggtgactattaattagctggatccaaagagtacaattaaaatacaaaaccatttctatttgttaaattgaaaaaaggtcaaaattgttgataacatttattgctctcagggttatagggaaattggcaatcatacatttccaatgggtatgcatgttgatacatttaaatttatcttgttcttaaaaacatacaaaacaattggttttaagaaaacagtacacgagcatgtcaccaaatgtaaaattacgtactttaaattccaaaattcatcttctagacatttatcttaaggaagggcaaaaatttaccttaaggaagggcaaaaatatttatcacagtattgattatatagcaaaaatataatggtatctttaataggatgtaaaactaatttgatttactaagcaaaagcatactataacaacacagaaattctaaaactaataacacttatgtagcacttaacaaatgcaagtcactctagccattgaaataattgtgtagctctgtacttattgatgtagaaataagtaagtctattttatataaaacttacataactatgcatcatatttcattttttctaaataggtaatgtatagtgtgtatattcatagaataaattctggaaggtttcacatcaattgacgttagagtgaccacatcaggattctcctggaacagtctattttcccaaagtaactattacaccgctttcactctgaaaaggtcccagtttggacaacaaattgtaccgacatgatagttatgtgtgattgttttaactttcttaattatttatatcaatattcaattatatcttaaaatgcacatatataacttgggcaaagaagaaacaatcatacagctatttcaatgtggaagaaccaaaaagtatgttccagacagtatgtgctttacagcaggcagaagatatacagtgaattacaatgctaatgaaaataatccaaattttggtattttctctccactattttatagtcatttccttgttgagaagagttgcagggaggaggaagatgaattaccatctttttctcagttttacctatctgaccctgtgatgaaacaactgtaaactcatttttaaaaaaggtttctaaacaggaaatattttcaatgggaggaggaaaagaaccagttcctatcaacagaaagtaaaatgctaaaaatctcggaaagttgaagaggatttgcaaagagcagttaaatatttcattaagtaatgaattttccaagcagaaggaagagaatggaggggtacaagagacagaagtagtcttcaacagggattcttggttagagagcctcttgagagaatctgcctgtattggtaataacatgtgcctttctttaaatgcatgagtttgtcatgaaagagagatttgtagaaaattggaacaaaaattgcttaatggagtgatgggaacggcaggtcttgaggctccaaagtggtgtagaaagcttacattaattaagatctaactggagagtaaacatcagcctcttgatgcagtggagagggttggggtggagagagaaattgtctttactgctttcaatagatgtttgcatcagcataactcagaagatttctacccttgagagtcatgatgaagttaagccaagccctttgagaataccagttatatttagcaggaacaggcattgttgaattttaaattatagattgtaccaggacctgctcagatctgaaccgcaaatgtcagcttgggtgaatttataatatcctaagtaagactagctaaacccattctacgattggtgcagtctaaggctctccctatgatgtctgtaaattcccaggaggattcttttctcaagttcaccttgatctgagtttctgccactgctcaccgtcctatgcatatgccttttctcacggaggtccacatgtagaattctgttcttttgtttatcatacatatgaatgcacttacatacaactcacacaccactcatagaaggcatttgtgggtgtaggatactttactgaaagtttgggaataaggaaaggtttacaaccacacaaacagacttccaatgttgtagccatttgtacaaaccttgatcctagttcttgccatccgcttagcccatttctctctttttcgctctgtctctcctcatctttcctcctaggcccctttctttgcagacataaaaacaaatatttctgtatttttatacacagcattagctttttctattcctttcccatataggcttagtgaggggctccttttgtgaatctaattactctggtctaattaaattcttagacaatgtgtattatttctccattacccatctaggtaaagtgattttattttacagtttaattgtatttctcaatctcaccaccaattcacaggtctttttcatttcttatgatgggcaattaaataattcatactctattttattaaatagcctattataataaagagttattgaagagagaagagcatttttattttatctctagcagttattcaagtttgaaataaatctaagctttttgattatatttaagaattcaaagcaatattgttcatctaggagtattgagacacattttaggcactggagaaagtttaggtagataacatgttgaattccagaatactgactaggttttttacaatatcatgtttgtctttttatttacatgttagttggactcatagaaagtggaaataagttaaaaaaatttaaactacatattctcatgagaagtaaacaagctgaatcaatggtacaaaaggttgaaaaatgtcatattgaagttgtattttgtttttgccacatttactcattggaacaataaacacacagatttggaaacaatgaatgcatagaaatctgtattatgagaacaaaagttagaaagagtgacgcgagccacagaataaaaccacagtattagttcttttatcttctatcatctctgtcatagatattcttgcatagggagtcctcttcacatgcggtggttccagccttactacatcctttcgtcttggcagcactgtcaaatatctccctgagtgtgcttttttcactgttaacagtgatcttttcacctctttcaatggttcttcatctgaacgctttcttatgacattaactgaagtttctctagatgggaatttatttgagtaaaacagcggcaactataaatctgcaaaataaaacaggaactcagagagcacatagcctcagaagatgtgagcgatacagaggaactgggaggcaatgtttcccacagtggcctcatatccttacccagaatggtgttgtctgggtctccttcaccgccagtggaaccctgcaactggtccatgactttggtgtgcatttttatctgacatcactgtgtatgtattttaacttatttaagatgtcatcttttaaaaaacaattattgcatgtagttttttttttacaaattggaaggtgggtacagttcatttaattcttcccactggtctcagaggtaggactgctatgtttaaaacaaattctttgacttctcttcaatagtttcatttcccagactttgataattgcctgctcttatctttctccaacttttgtcacaagtagatattccaaatagcgtctctaattaagcaggcgaaggctgaagctaatgctatatatgtgtatccatgtaatatcatgccagtgtgcctttcaaacctcctgttttgcgaacttgcaactggaagactgttagtttccatgtgttaatgaatgcagaacagcctgattttggcatgtggtacatttttcctttttttatctgtcagtcttttagtcagctcactcgtttgggcaatgacgcactacagcgcatcatatattcacatgatctggcttcacttggtgttgtaagttggtttctcaggagcagactctgagatgcacgttaattagcaggatgcttagtagggagagctctgggaatttaacagtgaggatggaaagggagcaggattgggcagaggcagctgtgatgctgtcctaatgagactcagctccccatcagagggtgttctggagactgggatcactgttcaaagttatgctgagtcgaagtaagagagccaggactttttacacccacatagatcagtctttgggtaagtgcttttcctagaaggaagctgaccttggaccaggccgttttcttcaactgaagcgatcttcaaagatggtggcagcagctgaggttcatcttctggtagcactctcaacagctggaagaaaaatttcctcattcctgcggatctgtgtggtccattacagcacctaccacacactttaaacatcattcagtttaccaggtttctctgaatcaatagaatattaactttaaaaaatacttttttcccgatcaatatcttacacaaaatctgtaaatatacataaaatataaaagagataaaaccatcttatttaccagagtaccaaatatatgactccacagatatctccacagatactcacatacttagggcttcttggaacacatttgaaaacctgctagatggaaagttgtagaaattcgctgatcatcagtatcaactgaagagcaatagcaacaacaaacaagaacacatacacacacattgttagggtccataccaggagactctacttcaaaaggtctgagtttgagcatcaggatataaatatccatacatatttatacgcacatatacaaatgcacaggcacacacatatttgtatgtatgtgtgtgtgtctcatatgattctagatttgtgctgttgaataatagcttttaaatgccgatttgttttaaattatgagaaaaaggcaaatatgagttcctatttattgcctaaaaataaaaatgtttctaaagatcatggcatacagattgggaggtagtcagggataggaaccctgatacgctacaattctcttctgttcttaatcttctgcttcttttattagttacatgtcattaattttatggatttcagttattactcagaataacttggtgactctttttcttggagccaactttattggctcatctggttaggtgctgggggaaaaagttctgtgatgaactttgacctccatcttcacattgacttccttggtatgtgcatcttcaaatgtaattgacaatgccacagtcctcttcaaaatgacactatccaccagaaggttatgaacgatcctgccactgtatgtagtaattagcacttgggagtatttatttatttattaaatatttattgattaaatactgcaggctaagcactattctgggtgtttgtgatatttcagtaaacaaaagacattctagcagactgacaataaacaatggacataataagtacattttgttgaatgttagactatgataagtgctgtagaatactgaaaaaggagagtagaatcgagggatcagaaatgttatagaaggaggaatggaggttctaattttaggtagaggggaacaatagacactgtgggctacgagagaatggcagggggaggagtggtacccctggtaccactcactatcaggtatgatgctcactacctgggtaatgggatctgtactccaaactcagcatcatgcaataatcccatgtaaaaaaaatctgcacatgtactccctgtatctaaaataaaaactgaaattaaaaaatttaaaaaatgccatgaagaagaaatttaagtgaatgaaagaagaagtaaataaatgagattcagataagttgtatttagaaggcaacatttgaaaagatctgaaaagggatgtcagatttctcccagataaccacaacccagccttctggttatctgggagaaatctgttcttgctagagctgggtttctcagtgatgacactgtgacatttggggctgaataattctctgttgggaggggtagggtggggagctgcactatgcttcgtagaacattcagcaacattcctgacctgtatccacttgacaccaataatatctttcccttccagttgttactcccaaaaatgactccaaacattgccacagtgggccaaaatcatcccaattgagaaccactggtataaactacatcaataattttgtatttttttccggttgcatcctgtctcagcactacctattatgcagtccaacttcctgctgaattgtaaattgctacctttgtcaaacataaattcctcatatttgtgtcagaattgttctattacatttcaaaggtcaatttaactacctctgaataaatattctcctaattactataactttataagcctgatagggaaaattcctcctgctcattctttgaaattaaccagtcttggctgtgcacttttccatatgcattttcagactagcttgtcacagtctataaaaaactgtgatgggattatgatagaaagtcattaaatttatagattaatttagagggaattgacacctttatgaaattgattcttcccatccatgaccaaaagtatctctcttcatttacttaggggatttttatgccttcaataaagatattattgattttctccatataggtcttggaccttttttgatagatttatttctggctacatgataggttctattgctaatgtgaatgatgtttttgaaaacaattatattttcttaatggctgtagtgcatagggatgtaactaatttttgtatcttcaatgcaacaactgccttgcttattatttctagcatttttcctatagattgtatttaatagtcgaggaagacaaatatgtaattggtagattataaattattttttcttcccaatgctttcacttcaaattgctttttattgtcttgttgctttagttggcagtaatagtagagatttttcattctgttcctgatcttaaagtgattgattctattatttcaccttaagtccaacacttgctatagccttttggtaggcaagtgttatcaggttaaggatgattccttccatatttagtctgctatgaattttatctctcctgggtattttatttaatatatttttggatttattgaaatgatctcagaatttttctcctttaatcaataaatgggggtaaattacattaacagatttttctaaagttaacctttctgatattactggaacaaacactacttgttcatactccttaggaaggagaatgactcccttctgcaagtaaggagctatctgctccatttctgcagacctcgttcctagaagaagttgcctatgcaggaaaattcaggtttattcagtttggagtctgtctataaaaataaactcatagaattatgaatacaaaatatgaaattgaggatatatttaaaattgaaaagaaaccagaataaattacaaaattttataaggctgacaaatataataaatatcacaaaatctagaaaaataactcaacttttttattcatgaacaacttgatcatatgtcaccataatacttttagttttgacaacttttgaccacatactctttaataaatcaccactttatggggcaagaatttaaaaagattttctatgtagagtctggacaaattattcagtcctttagtataaataaacaaaagtagtttttaaaaaattactcatattgggtattcataacacttgaaaattctcaaacatgtattgtctctgtttcatatatctgctacaggtctgctctctctaaacaccagaattctgataaattttattttgcatgatttccatagaggtgcttggtacatttatcataataatctgcattatctcatatattcatgacaagaaaacttctgttttgaagaggcatcattaagaaacaaatcctcttcttataattttatgcatgtgatattcggaagaaatttccagagactagcttatggctccataaaattcaaagcttatttctcttcgatttttcacataccgccattatagagatttgaggcatacctgcagactatgatatcactttgagccttgtagtttttcaacatggcatagtgtattagtctgttctcacactgctataaagaaatacctgagactgggtagtttataaatgaaaaaggtttaactggctcactgttccacaggttatacaggaaacatgatgctggcatctacttggcttctggggaggcctcagggaatgtgcaatcatggaggaaggtgaagagggagcacacacatcgcatagctggagtaggagtgagagagagtgggggagatgctatacacttaaacaaccacctctcacaaaaactcactatcacgagaacaccaacagggaaatccatcctcatgatccaatcacctcccacaggtcccacccccaacataggggattacaatttgacatgagaattgggcaaggacacagagccaaaccatatcacatagtaaatcttcacagttagcaggaagatatttctggaagtcatttcaacactgaggtgtttggcaataatgtaactatacacagaagggactctgaagctcataactatatttcactaaatgcaaaataaatgtatctcccaactcctcttccccttaagtggatttcagaaatggccatgactatatcactatcaaatggcactagggaataccagtttgggttgaggaaacctgatcttaaagaatgcagcaaatatatcttacttaaccaattttacagaaacatatgaccagatgccattgctaaggcccctcttggggccttgggaagaatctgtgcaaggtaggggccatgaaacttgcattttattagctttagggttcacacatgcctggtcacatttatgcaattaaaaacaaagcaaaatgatactgaatatataacatatggcattagtaagcttgtgtgacatatttcacaatgtgttccccttgcaaccttgcaaagtgaggacacacactcaacttttcacagaacatttacctccagactgctaattaatataagatgcccataaatcatgtctctgatagagagcttctgcatcagacaaaggcaaggaaaattaactttaagaaaatgtctgataattaaactttaattttccttcccatcccaaaaatttgcttgcttttcctacagattgaggtcagttattttttctccacactcagataactcccactagtatttgatattaatgaaatgcatactactaaatattcttatatgtgatgattctccacttactcatagagggatgataaacaacattttctaagtgctttgatctctaaactattaagttacttttgtttttatatggaggtctttggaaatactgaatatatgttcttgaacttgccctctgttggaaaagagatccatataaaaaaattaataaattagctccatgttttctctccaggaaatattcagatttctgagaattattaaggaactcaattagggaaacattctaagaaactatgaaacagataatgtttatctttcctttctcaaatcttccctttctgtgcatgttcccgcttccttttgtgttcattctgttaagatacacgtagtatttatagtctttcctgttctttttttttttttttttttttttgagacggagtcttgctctgtcgcccagactggagtgcagtggcatgatctcggctcactgcaagctctgcctcccaggttcaagcaattctcctgcctcagcctcctgagttgctgggactacaggcatgtgccaccatgcccggctaattttttttttttttttgtagttttagtagagctggagtttcaccacgttagccaggatggtctcgatctcctgacctcatgatctgcccgcctcggcctcccaaagtgctgggattacaggcgtgagccaccgcgcccggcctttcctgttctttttaatccaattttagggaagcttctgatagactcctgtgcctcaagtatcaatttttaaccaattcattcctgatagtttgtttttcactgacatttttgctggatctgtgaagctcaaaacacacaacaaaataaactaagaatgattatctgagaaagtgctaagaacaaggaaataaatgttggttccaaatataaccataaagcttttaaaatgaaatagttttgacttattaaaggaaagataaacagcgaagagacatcttcgaagatgagtagaaagtaggaaaaacaaaaacttgagaaaatattgaggtaatcacagcttttcaaaagtcaaaggaaatttacagtggcaacagatgaatccactccaattcccaaattttcagaatggctagggtaaataaaccttctcaaataaactttgaaatagcaaatacccgaggagggaaattagctttgctcattttgaaccaagatactataaattctagtgaatgagagggcagctaccctctgtcctaagcataaggttgtataaaataccagacatttttattaggcatttcaacattttgtcctggggataaaaatcactgtacctcagccagggaaagggagcacattgaaatgggaatattgttggtactatgggccccacatgtgcctgagcatcaatgttacctgtggagcttgttaaaacccaaatgccagatgcacaacctgtactgggaactactggcccattaaatgtagatcagaagcaagaggctgctcttacggaatttttttttaaattaagttgtggtaattgttaaatcatacttccttactaaatataatccagccaagccatccagacagtcatagagcaggcccctggatcattgctaaagagttttcaactcatctttttctcagtaaagactgttccccttttttaaacctgacattttaaaaccacccttcttcatggtggcaggctcacctaaactatgacatacatgcaatagatgcaagaggcagataagggggaagagtcccaggagaatctctgactggcctgtatgctggatggatggcgtggagcccctgggcgttcccaacttttgcagaggggaggagcctggcctcttcagttcctgtgtggtagcctggtattcaatctgtgagttggaagctggctggcaggacctcctctcgctttgctgagagctttccccccactgtccccctttttgcccaatgacttcctttcccctcacccttcaatgtgtctgcatgcttaacttttcctggtcatgacacaagaacctggatttagctgaactaaggagcaaaaaatctgcaacatatgtgtgtgcatagggactaaaagtatgggccttaaacttgcatcagaacttgaatactgattctgctacttaccagtcctatgacttgagtatattatttaatctctgagcttcttttttccatcttttaaatgaagagaatgatacttaatttataggaaattttaagaattcactgtaatgattgtactagaaagttatttacaaggtactaggcacattttaaattacaaattgcagctgcttcctggtgacatttagaataaacaccaatctctgtatgtgaactatttacagatcatgttgtcaggtaccttaatatgctgaaatcttcattagaaccacctgactttattgaccaacattatattattttctgaactgtattcacttgtcacacctatgagttccaaaatacaatgtgtatttaggctttaggcttttgtagcattgtggatacataggatatatctttccagctttcccttctgtaggaaataccctactttaatgtcataataatcctcttcagcctccatcaccttacttaccagttatgagcatttcaacacaaggaatatcgcaattatttcaggtataggtatgctgtacaagccagacctagcatttttcctgtactttcgcaggattttgttgagaaagatgttccttaatatcctctagaatcacaggctgcaaagggacaatgcaagctgaaattgttaattgtctttcccgtcacgtggagacagcctctgtgaaaatgaaggcaatataaatggaagtacaggcaacaagaaagaaaccagtggtgcctgaagtgtgagtgcctggtttcagtcatgcctgaagtgaaccgtgaacattgtataccctcatagatattctagttttataagccaatatgctttttttccaagctggtttgtactggatatctactctactttcattcagaagcattctgtccagtaaacatatcatgttttcttttgcctggaatgcctgtatgtttctgtgcatctaggaagtgctattttatttttgaattcctcagtagaactttcctgaaccatttcctttattgcatcccggctaacttagtgactccaccctttgttcatgcccctgcccaatcccaactatgttagctgtcttaagtatgtgatttcctcacagactattaactcccccaggatagggactgtgtcttactcaactttataatttcagaatcttgcagagcacctaacacctagtaggagactaatgatatctattttacagtttaactaaaggaaacataagtcacttgcagttttcaaacgcagagtcaaaattttatcttctccttggcacaccctatacgtgaggactatttgatcacaacactcattcattgaatgtgaatactggaatctaagagacagcagaccacatcttccatgatggagaatggtaagctaatatagttcaagcactttgctttctgataatttggcaacttggaaaatctagaagaatagattatttacgtagtccattggattcattctcttctaatatcagctgtctcaaataatcctttagcagacactggcttcccatcaatttatgattaaattctctagcaaatgcctgtggtgcagttggtctctcaagcaggtttccccactgggaagaaagtacactgattggctactgtggatagctggaatcttggcagtcaagatttcttcttgtaacttattaaagtagctttctaataccaataaatcctgtgtgactttgattggtgtgagcccggtttcctggggctaaattactacaagtaagctgttaaggctgtgtacctgggagatcagtgtatggactcatgcccacaggagacctgccctgtgatagctgtcagtcttccattgcagctccactcctttaagcccaggcctgtcctgctgaaggtgcacactgagcatatcaatatttcatcagttcatgcataccatttgcctttaaatgtggcatttgctaaatcctcagatacagtttggattgtgtcttatggccacttttgcttttgagtctcatctctgaaattcaaatataaggcaacaaagaaatataatttgatttttaaaagcatttaatttatatcaattttaagaataaacatcattaaagattggagaaacaatagactgtgtggtgaccagtggacatggaaatcttttcaattccagaggcttttccccaccttccttagctggattctagggttcagatattttatgtacaaagacgttcctcaaaaaatttttcaacatcctacctaacactcgtgtgccacaggctttgagagaaagggtgccattcttcagtctcagagtttctgtaagataaaacaatgcacaccctttggcacaattagtaagcagttgctccctatgggtgtggaccatagttcgttttgcaaacaattgttcccagtgaccttggcccatagtttgttttgcaaacattgggttaagctccttcagagggactttcaaggcactatgaactcaaataggaatttactggagaggggaagatttagttccccaaagagaggcaaaatgggaaacacatttattgaacacctgctatgaggttggtgtatcagatatgctttgttaacaaaattcacttaaaactatgaggtgccagcaactatagcaaataaggattcaaaaatttgggctcaaattataattctgtcctttactaactgaataactctgggcaagttatgtaatcaatctgaatcccaatttcttcttttgtaaaacagtactaatgagagaggcaggaggcagagaaatttagggagacagaggtgggaccctagtggaaaccttaccttcaagccaaaagtagcctgaaaccgacggcccaaagtgagaacttctattcctgtttgtccactctctccagattggttctttttgaataatgtctttttaccaactgcatgttgccttttccaaaactacctatggcctggcccgcctcccatcctgtgcctataaagaccccagactcagctggcagagaggagaaatggctggatgtcagggagaggcaacttgactttggagaagtaactggagttggggggacatcggggagaggcgacttcagagacaatggctggatgtcagagagaggcaacttgactttggcggagagaggcagagaggtgacttgactttagggaagcacgacctgcccttcctgtcccctttcaagctcccttctccactgagagttgctttcatcactcaatacgattctccacattcaccatcctttaattcatctgcgtgacctcattcttcctgagcaccagacaagaattcaggacccaccaaacgggggtacccaaaaaggctgtcacactggccctttgccctcactggcggagggcagctgccccatgcgatgaggcaaaaggcccactgagctgataacattattgtctgtggatggtggagctaaaagagcactgtaacatgcatggcctgcacagagtttgctcctactggtgccaaagaggccagccacttcccacactcacttgcctgtgtgctcccattcgcaaggggtggaatgcagtgtgcccaagtaaatggactttgctcctgtcagtgccaaagcggccagccaattcccacacttgtttgctcatgtgctccttcccaagagggtttgagcatggtgggctgagtaaacagagcaccactgctatgagtcctgtgatgggatcaagaaaatattctgcatcactactaatagtacatacatttatagtttttaaaagtaagaattaaatgagatgtcaccttcaaaccctattaatataatggtttttattgtagatttatgtatattcacgatttaattaaatcagatttttaattaaatcacattaggaaactcagtatgcaacaagttggccgtttatgaatgcaggttgacccctataaccctattttttggttttggaggtagaggtgatgggaagaggagaaagaggtatgcatttaagaggtagggaagtagggttaagatttttgcagagccttgcaaagctggatgatgatagcagactcactattctttaagtattagattatgcttcagctgctcagtttctcattatttttttagagtctattttagagcctttgccatttttaggcttgcttaccacatgtctcaatttttctgatgtcagaaatggctttgaaaagttatacaacactgcagcaaccttggtcattcatcagctctcaagcatcaaaagtgctgctgctattgttcagcaacattgaaggaagggaatttgcccctcgggattcacttttgattgctattagatttttagtcatagctattgccctcataagaaacatccgtaccacctgggctgccctgcagttttccattatagcgcccaagctgttcactgagatacagtgagagtttaagcaatgtcatccatcccagccttatttgacttgagagtaaaacccagtgtctgaaatctctgtctcttgctatcctaaaactgtactcatcaatctttcttctcatcagttctaggaaaaatgacagaaacagacattttccccctcgctttccagttaaggcaactgaacttaattttaagcgtgtcacctacactgcattacacagctacaacagagtgttagctagctccatgatgaatggcagtgccactcttaaccttgttttggaagggcagtttcctgttttaacacagtccttagaaaatgaaaaaaaaaaaaaaaaaccctgaaacatcaaccactcaaatattgtttcttagagcccactttactcgtttgacactagagaatctcagaattctgaaaaaagccaagtatgggtgtttgatattttggcttcagatccaaactgctgctatagcaatagtagaaaagaactatttggctgggcatggtggctcacgcctgtaatcctagcactttgggggaccgaggcgggcggatcacaaggtcaggagatcgcaccatcctggctaacacagtgaaactccatctctactaaaaatacaaaaacaaaattagccgggcgtggtggtgggcgcctgtagtcccagctactcgggaggctgaggcagaagaatggcgtgaacccaggaggcggagcttgcagtgagccgagatcacgccactgcactccagcctgggcgacagagcaagacttcatctcaaaaaaaaaaaaaaaaaaaaaactattttccagtttttgaactttcaataaatattttcttgcaaagtatagtcatttgtttcacataagcttcgaaggttttagaataaatgttcctggtggaattatgactgagagttggttctattgtgtcttttgaatacaccgcattttctattcccaccatagccagaaaattttagcatcactggccaggtagtcaatattgttaggggactacagtattaagaattaaggtaggtattctctctcaaggaaactgggatcttgcttggatacaaaaaaattataatgctgggtaagaggcctgtcttgaagatgcaagatagggctttatgagaatgtggtggtatagggctgaagacagaactaagttcttaaccatcttagttctatggaagcttttagggattatacaaaattctccattacttatggtcaattatgttaggttttaggactattaggggggttaaaatatgaaaatgaataatataaattctgttatgtattaaaatatgtgggaaattctagaattactgcatcaggatttttcaaggtaacacacaaccctgagctgcaacaggacatgggatgtactgtctatcaagtactgtagtggaacagggatattgcagaggctaaatggcatcaccacttttcacaacagtgagtctggaaagctcttatacccttattatcttactacaaaaggacaaaatgaagattttcaattttctgaaagtcaagttttggaacttttcagaatcaacctgaaagtcacaggtggtgactgcattgaagcctcagctcataaatacttttattcccaaagagcatgagaggacaaatgaataaatgaaatgtagtatatccggcagggtgcggcagctcatgcctgtaatcccaacactttgggaggccaaggcaggtggatcacctgaggccaggagttcggaaccagcctggccagcatggtgaaaccttatatctactaaaaatacaaaaattagccaagcatggtggcgcacacctgtaatcccagctacttggggggatgaggcaggagaattgcttgaacccaggaggcggaggcttcagtaagccaagattgcaccactgcactccagcctgggtgacaaagtgagacttgatctcaaaaatgaaatatagtatatccatacaatggaacactgttcagccacaaaaaggaatgaaatactgatgcaggccacaatatgtctgaacttcaaaaacattctgctaagtgaaagcagccagacacgaaagaccacagcttgtgtgattccatttatatgaaacgtctagaacaggcaaatattcagagacagaaagtagattagcagttgctgagggctggggataggaacggagagggactgcacgtgggcacagggtttcttttttggggtgatggaactgttctaaaacgagattgtgataatggttgcagaaccctgtaaatatactgaaaaaatataccgagttgttcatgtaaattgggtgaatttttatggtatataaattgtatctcaagagagctgtttaaaaataaataaaagggcagtaggggcctttgcagagaaagaagagacctcatgcactctgaaagactccagcatgagtctcattaaggggagcacttgttcttgacaaggtacctatgactcaggcatcagattatttacaccatctcactttcagaggagaaaaagggattctccaggctgagttcacgtcacagcctatgggacacagttcagttgccactagagggcactactatgccattgcctttgacagcaacactagaacaagtctttggcaccactcactgctgctgctgtgttcaggaacttggagaacactcctatggtcttccatgtaaatgacttaccctggacttgggcctccctgtactggctattggtcctttagattgtgctagagggtgctagaaggcagaatgatcactgaaagcctcagacatttatctccactcatagggctaagtacattctagattacgaccaagcagcatattcacccagggctgcaatattccagtgagctccgcaactgaaataagtaggagctcaacgaatctccaggcttcaggttagtattcattgaatactaactattggcctagaatgggtcttggtgggcctcagggatgcgggtaattgtgagagtggtcctcagtgtcagacactgagcaaagggggctctaacctactttgcagagtggagaggttccagttctgcagctatagagcttgggacaaaggggaactggtgtcactgacctgggtgaaggtagatgggaaagaaattacatcatgatggcagatgggcagggctgagcacattgcctggtgtttggttgacaattaatgtgctaaatgaagaaaaatgcaaatattgtcacaaggatcagcagcagactttcagaaagaccggaagattcatttggggagctgcagtagaaatcatcctagttaagtcagaaaaatcagcggggaggagtttgctaaggatatgagtttaagccgaaggcttgggacagctttcagcttggagtctgtataggctaccatcaagtcttaaactgggagtcaaattccctttgaatgcagtagagtgaaaaaaaaaagattcattttagataacccaggaagagaaattaaaagaaattattactatgattgagtaactaatatggtatcataaagatttatatcttatgggttagagttttttgaagattccaaatttatggaaaagtaaatacttgccattaacttctaccttaattttttcataaacaactggaattagaataaaatatttagaaacaacagcaccagctccaaaattaaacaggtgttggcgtcattgatcagacttacagagctcaaccacagagatgtcttcataatgtccttacagcaagctagcagggaggtgtgcattttaacgatgttgacttttggtgagaaggtacagaaggtttatattattcacatattctattgcgcttataaattgaggtctaacaggtgttatcagttttgtcatcactgctgtttctcctcgcttctttgttggtaattgaattcattttgtcggaaattcacacatgaatccaagtcagatagtctttctgagctgtatctgagaatttgtagagaaaaataggaaaggccacacacacttgaatcataagatttttttctttttttgtctcacaatgtttttgatttgggaatcagaggaatgctgtcctcataacatgagttgagaagtattttctattttctggaaggatctgcatgaaattagtttctttattgctctttgggatttaattcatgggtgctcactcagtatttacatcactgttactgcagagggaatttgttttatgaaagggagcaactttaagattaagatggaaccactcacttttttcaccatctcccacctaaaggaagcttactcccatattgctgaagtttgagtgcccttttggcaccttcctggagtattatttcatatcagatagacgtgggttcaaattctaactttgcctctgatttttctgtaataggctttattttaaaaaattagatttacagataaaattgtgcaaattgtgcagaaagtagagaattcccatacattcctttttcacccccacagtttctactattattaacattttgcattaatatggttcacttgtccatagttgatattagggttccctcttcatgctgtacagttgagtttcaacacatgtataatgccatgtattggaccattacagtatcattaggagttttacttccctaagcttatcctgggatctatctattcatccagccctttctccccccgaactctggtgaccattgatctttttactgtctctatagttttgccttttgcagaatgtcgtatagttggaatcagtatgtggctctttcagactggcttctttcatatggtaatggatgtttaagtttctttcatgtcttcccatggcttgatagctcatttatttttgttgctgaataatattcccttgcctgggtgtaccaaagttcattcctttacctactatagaatattttggttgcttctaagttttgggaattataaataaaccttttataaacatctgtatgaatgtaagtttttttgtgtgtgcacataagtattcaactcactggggtaaatacctaggagcatgattgctagactatatgataggactatgtttacttttgcagagactgtgttttctaacacggcataccattattcgttattcattctcatcagcaataaatgagagtttctgttgctacacatcctcttcagtacttggtgttattgtattctgggttttggccattcgattaggtgtgtaatgctggctcatttttgttttaatttgcaattccttaatgaaatatcatgctgagcatctttttatgtgttatttgttgggtttaccttgtttgttgatctttggcccagttttctgttttctttttttttttttttttttttttttagaaagactctggctctgtcacccaggctctagtgcagtggtggcatatctcagggctcactgcaatgtccacctcttgggttcgagcgactttcctgcctcagcttcccaagtagctgggattacaggcatgtactaccatgtcctgctaatttttgtatttttagtaaacacggggtttcaccatgttggccatggttggtcagactggtctcgaacttctgacctcaggtgcttcacccaccttggtctcccaaagtgctgggattacaggcgtgagccaccaagcctggccccattttttgattaggtggtttgttttgttttcttgttgttgagttttaagtttctttgtatattttagatacacattctttactggatatgtgttttacaaatatgtttccctagtctgtggctctcctttttattaactgtgtaacctaggccaaaactctgaatctttttcagcctcagtcttctcctctcaaaaatgagaaaaatgatatctctttaataacatattcacttgtggggttaagagatagatgtgtgagttatgtgaaagattctagtatactgcctggctcagtcaaagttagccttttggctttgcctctttttctttcatttctgcaaacatatgtccatttaatacttatcgtgttttgcatgtggttcttttcaccagtgtttttcacactttaatgagcacatgaaaataacttgttaaattgcaaactctgatttagtaagtctggagtggaacctgagattctgcatttctaacaaactcccaaattagttagtgcttctgattcacagagcacatactgaatagcagaataaattcctaagcagcaaagcattcaagaaatggtgtggctgcttctaacaacctatgcgcagaattagacccagaaaccttgggggaaagaatggtttagggggccaggtccaggaccctactttcctgggcaccctcaggacactgttccctgcatcctggctgctctggctccagccttggctcaaagcagacaaggtacagctcaggccacagccttgcgggggcagaagccataagcgttggtaacttccatgtgttaagtcggcagatactcagaatgcaaacatgaaggaggcttggcggcttctacctaaatttcagaggatgtatggaaaaccctgggtgcccaggcagaagcctgccacagggacagagcccccacggagatactctactagggcagtgctgacaagaaatgtggggctggagcccccacacagagtctccaccaggacactgcctcatggagctctgggaaggagcaacagccctccagaccccagaatgataactccatcagcagcttgcaccctgaacctggaaaaactgcaggcactgaaaactgcaaacagtgagagcagctgtgtaagctgtacccagggaagccataggggaggagctgtccaaggctttgggagcctacccttagcatcagcatgagacatggagtcacacaagattatgtttaagcattaagatttaatgacttcctcgctggatttcagacttgcatggtgcctgtagcccatttttggccaattttcccttttggaatagtaatgtttacccaatatatgtgtaaccattgtatcttgggtgcaaataacatgtatttgatttcacgggctcataggtggaaagaactcatctgcagatgagtctttgcacttgggacttagggcttttgattgagttgatgctggaatgaattaagactttggagaactattgagtagggatgattgtattttgcaatatgagaaggacatgcgatttgggagtggggggccaggggtggaatgatatagtttggatgtttgtcccctgaaaatctcatgttgaaatgtgattcccagtgttggaagtggggcctggtgggaggtgattggaacatgagggtggatccctcattaatgggttagcaccattccatcggtgatgagtgagttctcgctctgagttcgtgtgacatctggttctttaaaagaccatggcatcttcctcccccttgctcccacttcactttctgctgtgattataagcttcttgaggccttcaccagaagctgaggagatgttggtaccatacttgtacagcctgcagcactgggagccaattaaacctcttttctttataaattaccagtctcagatattcctttatggtaatgcaagaacggcctaaaagagttgacagtcatcagttttccatacatagaacacaataggaagaatataacagaaaataccatagagagctaagtattattgaggtcaaggtaaaggaatttaaagtttactgtatcacactgaaggagggctaagaaccttgctttttcacacacatactgtgagtttctttaatacacatgatgagtaaattaatatttgcttatttcaattatttgtgggaaaaagatgaataaaatagtctgaataatccccaatgatgaagcagagacacaggctggactttgaggactggataggatgatagttgacagaaaacggggaggaggtgggaatgacccttgagctttaaacagaaggtgtacagtgaagggagtgtctagtgaggagctaaaggagaatgtctgggccaggtatgagaggaaactgggagccagtgaagcactttatttgtgtgtttagaattagaagacaaaagcagaaacacactgtgggttagaaagagtagaaccatagaaggaacttagattggaagactagttaactttcttctctgttgtagtaatcaaggaatgcattgacaagagcttgtgctaagttaatagtagaaagatgaagagaaaaggagggattcattgcaaaggataattcaatggcctaagctctcccgctgtgcataccgtggagttcctccgttaagtaaaggaaggggacccttatgactccctgcctgcattgtcagatgtcatgtgatgatggtcatgactcctatccctaggatagaacaaatgcgtcagtgatggaggaccctgagaaaataaagtaggagaagggagggatagggtatgagtgcaaaactaaatttgtctgcctctttatctctatggaattctttcaaacctttcctcccttgcttctcataccaccaaataaagacgcccatctaaacctgcaacttcacatcaacttttaccattttcaagagcttccaagccaggaatgttagagctggaaggaacatgataaaaagaaggaaagtgaaagtgaacagtttacacagccagcagcacagtaaccggcaaggggcaaacaaacccatagatgcttcctgaatgaaacaaatgagatacagggaaaagattaaaaccaagaacctctgacttccagaccacttgactctgctgcctgaccctcttcttaaatccatgctgcctgagtaaacgtccaggctccacatatttagaccacatcgggaaactagacttcatactgagacttacggtgagcactgccttttagttaaggggaggggataggagaaaagtatctggagaagccataaaattagattcattaagttatcagagccctaaaaagaaatctggccccactggtgatacactgaaaaaaaaataattggttgggctggccataggggcctaaaggttcacagagaggaatcagtgctaaaggtagtaagaaaaacagctcaaggaaaccctctgagctagcagtactttctttcctacaacttcattttagcttggctttgttttttatattgtttgggggctattttattaagcccatggatccctcagacaggtatacagcaatagggtgaaataaaagagaagaaatatttgctacagaatggagcgagtaaagaaaaagattatcttttgtggggaggctctgaaatccttgggtctctagatcaatgccttctcctcaattttcctttcagttcccacatatatggattgtgggcaatcagaagctcaaagtggaagctctgaagatgggatcctttctggtgtgttgaaaaatccctgggcttgtgggtcagcaggatgggtgtggtgtctctcagctatgggaatgtaagatttacattttggggccatggaattaaacagatgagggtggactcttagctctgtgacttggtcaagttcttaacctcctaattcagttttcatttctaaaatgaagataataatcatatctacttcattcactgtttttaaggattaaatgggataatttaagtaaagtgctgagcactcggcccagtccacaggaagcacatagtaaataatgcagatgatcattattaatagaaattattattattattactagggagcttcctgtagtgcccactgggaaacaacatggttgtgtggctacagcctgggcagcagaagtaggtgacaaaggagaataaaccaacagcttggcctccggagctttgggtttctgtctttgccctaatagtttccagtttaactcagaaaaatctccaaacctctctagattttggtttgtgtcagaagtgttaaaaaagtataataaaagccccagggagatgatggaccagagagaaaactttatacactgaactgttacgttatacatgtgaactattttttgttatttgtaacaaatctggacagccccttcctttgtacctccagctcctgcctttttaatctctgatgccaatctctgaacactgctagggcaagcccaaaggggaaagttgactataacttggtgatctatgctatggtgatctgcgtggagactttttgtcaagtttattgtcacatcacactttccccagagcagctgtgggtcactccccttcctaacacccctacccttttaaatccttctacctgcagcatctgaatggcatgaaaacatggcctcactgcctatgaaacagactcgtgtcacatgggaggggtctcagtcaatcagaaaacgagggtcaagggaagttctgctgcaactgcagaggtgtggcctcagttctctttggccggtttctgcaatctcctcaaaaagacagaaatatgtctgagtcccgcgaaggagaataaaaacaaagagatccttttagcctggaggaagaaccaagcttgcaaatagagagtcttgtgctcaggcaacattctgccagccaagttgtagctatctacagagatcctcagaggcaggtctgcatggaatttacctgtcgttgagcctgcatctgggagcttggagtgactatgaagcacagagatggctctttaaacaagtattcctgcagcttggcatccaaaataatggtgccctttaaaacagatgctactggaggctatttccttgcaaatgcacttactgtattaattcccactaggcaaaatattgggaatttttctcttcacgtggtttcagaggcagttacaaattacaaataaaaaaggcatctaacatttggttgccaaattatattgcccaactttatcaatgatgtaagttattttttcatgaaaacaataataatagaatttgttaagtatgttaagtccctgagctctgcatttttcaacgacattcaaggtgggaacagtcatcctggggataatccctacattttagttgtcactccagtgagcttctcagtgtaaattcacactcagaattgtttaattccaaagtcaatacaatttccattatggtaaagtgattgttttccaagtttcaatccatctttaaatgaccaaaaatggcgagagaatgtgctatgaggaattctaaaagtgattttataaaagcagaatcaagttttatatttaaaacttgagctggctctggccaggcacagtggctcatgcctgtaatcccagcactttgggaggccaaggcaggcggatcatgaggtcaggagatcgagaccatcttggctaacatggtgaaaccccgtctctactaaaaaaacaaaaaattagccgggagtggtggccggcggctgtagtcccaactactcaggaggctgaggcaggagaatggcgtgaacccgggaggcagagcttgcagtgagccgagatcgcaccactgccctccagcctaggtaacagagcgagactccatctcaaaaacaaaaacaaacaaacaaacaaaaagacaaaacttgagctggctctattgaagtaagtgtatgtacacacgtaatatataactactttaaaggggaggttttctcatttcctatcacacattacatatgtttatttggaaaaaatattttcttcctaaactgtaacctatgagtttttttctctgatgctctttggttttttatttttagcttgaaagatatttctagatatgtttgttggaagttaattcattaattcagcagaccagcatgcgcaggtgcatagtgtggcccgcagtctgatccaaggcaactgttcatatctccaagcattctttctgtctttctttatctgatgcttgggtatccttccacctcagcctgctcaccatttacaatagaaagcaaaacttaataaaattcttaaaggtggtgtaaattgcactaaagagcagagcttcgagttctcatcaggaaggatgacccaaacttaaacgaagaagtgggtgtgaaggaacctgtacagtgcttggcacagagaaaacactctaaagtattgacttcgttttttttcttccataaatcatctgctttacatctcatgtgtgtacatggggtaaaataagtcttacttcaggaaaaattctttaaaaggacaagttgtgagtctacttctctagatattcccagctctttctcagaatcactcagatggattacaaagtgaatatgcagagcctcttgaccagtgattacccactctcctccatgaaacttagggctttacgagctatctttcagagtttctcaaaggacttagtggttttaaaagctatagttccttaatctagccaaagacattgggaaaaaaaagcataaatgtttttaatcaatctgttacacttggaaagacaatgaagcaggaacctccagctcaccttggttcaaatttcaatttgactgcctaccagctgcatgatcttaggaaaggcattgtactttgttatatatagttacacaaatatgcatgtatatatacacatacatcatatatacacatttctatatatagctatacggtatctgtatatacacacgcatatatatgtgcgtgtgtgtgtgtgtgtgtgtgtgtgtgtgtgtgtatagagagattagatacagtgaagagataattgagcttatgacacaggagagactacctaaaaatacctgtttccctgtttttcctattcgcttttcaactaggtaggtctctagagagtgggaaggaaatgctctgaacatgtcccattgagacagattatgagaagagacaattcaactgtggtcccacagccaagaaaaaatgtacattcagtcctaggccatctcccatcctccaaaaccaaaccaccaatccagagcccaaatcctgccctctctatggaattattccttctgttcatctcccatgtggcaaaagaaaaggaagctccagatttcctgattatctgttgaacattcaaggaagacaatcagcataaatcatagttttgcttagaaaccccaatctccatccaacaacaacaatgcaattataatttccattttagaattcttttttatgtatttccctcttttgtgagtatgtataatgcaatcatgaaaataagaccaactttaaaataatatttaaagttcagaatctgtcagtggaatggccagattctattgtggtgaactcccttaggagaatcacatcctatggggtcagatttttctcctgcttcacccccttttttattagacacgctactctgacagtcaagttcatgaatcctgcatcataatacctgtctctatattccttttgagggcagactcttcagaaatgcaataacaaaattatcagatgattaagatgacaaatgcaagaagccctttgacgccaatagtgtgaagcaaagatggttaccaggcagagagcattggctattaaggaggaaaatcaaaggatgagaagggaagctcaaaaaagatactgaaggggcacatggtaataaaaatggtctctggtgctgaaggaattctgggatacaataacttaacaaacaaccaagacctttggattgtagagtttagtaccataaagtcttgctacattcttgcttgctgttttctttttctttattatttttaacatcccataatgtgctggcctgaggaattagcattgctttaatagatgtaattttgttacccatggacacttaaaaatggtcaggccatgtgggcccaggtcatgatttatgatggcttccaattctttctgaacattgttttttgtgataaccagctttaaaagtctaaatggtctttttcaggggataatgcagaatgtataaaaggtatctattctttctgcctacacctggatatgataatagtagtatttaacaaaaggctttaatatatacatgtagaagaacacattcacagccccaattcttcacttctccacataactgcttcttttgctatgtgacttttcagttctgcccatcaaagagatagagtatggactgtaggtgactttggctacagcttcatgacttgctgtggccagttggatgttaatgtgagtgatgtgaccaacacattgaaaagcacttgtacagttggtgttggtcttttctttttgccagttattgttgtgagaagggcatcagtgggcttgtctgacatcctggagaaggatgaaagacacaagaaacagaactgttctgattaagcccagcctcaggcactgactcccgggcagtgcacaggcatgcgagccaaagagattcttatcatcgtgttgctgttatacactactgagcttttgtggtcatttgtttcacaccattgttgtcagaaatagatgttacctataacctaagacctacctgacctgtgaaagacagacacatttgtcacatttttaaagtagcattgacacttgagttgcttttctgttgagcttctccatgtgtttttttgttgcttataatctagttgccttccccactctcaccagccttccctggtcttgtctcctctgcttttatttctaggggactgacatctctaaactgtatttcttgtattctcttgtactctggcttatgtttgcgtttggccaatggttgatattagaaggtaggaggagagatcagtctttaacttcttcattttcttcctgccttgctgcagttctaagagtggttgtattcctttatagttacagctcctgttgaacagcaccctgtccatgtccatggtctaagcttacgctgggctccaataactgtgttccctcctcttacctgcaggctggggtgaagacagggtatgaggtgtgtgtatgtgtgtgtttgtgggtgacaattttccttgttgcttatttctagggatctcataatcccttggtgaattctcttgactctgtgtataactcaatgcccagtttctttattacaaattacttagggtgtgattttttttttttacagtaccacctatttcctgttgagacccaccttctacatagtttaaattgtacctattccaaacttccaacaagtatttcgtagagattccttaaaacaattacaaaatctctgtaattactaattactagctcctgtgctttgtaaaaaaatgaatattatatattattttcaaattacactgaaacaaatcagtttatttgacactcacaatataacctgattgacctcactcagtgagctggtcaaggcaagaacttttctctatggagatgtggaactgaggcatagaatttatttctaattactattatttttattatttgatataagaatgagatcacaaagcttggcttatggtactttttaaaaaactgtggtaagaaacacatattataaaacttaccatcttaattatttgtaagtgtacagacagttatgttgagtatatttacattgttgtgaagccaatctccagagctttttttcttgcagaagtgaagatctgtatctattaaacaactcccccttcttttcctctctccatccatgagtaacaaccattttattttgtgtttctatgaattttgactacattaggtacctcatataagtgaaatcatatagtatttggctttttgtgactggcttatttaacttagaataaatgtcctcaaggttcccctcacgttgctgtatatgacaagatctccttctgtttacaatgcttactaataacccattatatgtatatggtacattttatttgtccatttatccactgatgaacatttaggttgttttcacatcttggctactttgaataatagtccaatgatcctgggagtgccaatatctctttgagattctaattttaattattttggctaaatacccagaagtggaatttctggggcatatgacagttctacttttagatttttttgaatctgtattgaatctggagatcactttggatagtatgaacatcttaacattattgtctcccaatttataaacctgggatgtcttttcatgtatttgtgtatttttaaaaaatttgtttcaacaatgtcatatggttttcagtgtacaagtctctttggtctcctgggctgtttattcataagtattttattatttttggtgttactataggattggttttttaatttaatttttaaagtttagtttttagtgtataaaatcaaactgatttttgcatattaattttgtattctgaaactttaatttattagttctaagtttgtgtgtgtgtgtgtgtgagtgtgtgtgtagtttttactattttctacatataagatcatgtaatctgctaacagagttaattttacttcttccattttgatttgaataccttttatttcttactattgcctgcttgctcttgctaggaattacagtactatgttgaatagaagtggtgagaataggcatccttgctttgttccttatcacagaggaaaagctttcagtttttgaatactgactatgatggtagttgtgagcttttcatatatgacctttattttgttgaagtaaattttttgataagaagtttgttgaaagtttttatcatcaaagggtattgaattttgtcaaatgcattttctgcatctattcagataaccatgtggttttcattctttgttttgttaatatggtgtactacattggttgattttagaatgttgaaccacccttgcatcccagggataaatcccacttggccatttttaaattgggttaaatttctcagtttgctatttttgttgttgagttgttgttctttgtttatcccagatgttaatttcttatagatatatgatttgcaaatatttttcccattccataggttgcttttttactctgttgattgtgcccttttatgcacaaaagtttgcaagttttatgttgttccatttgtttgcttgcttcttttctgtgttcttcatgttatagctaagaaatcattaccatgtctaatgtcataaagcttttcccctatgttttcttttagaagttttaaagtttgaggtcatacatttagttctttcatcaattttgagttaatttttgtatatgatgtaaggtaagggtctaacttctttttttctttgcatatgtatattcaattttcccaatatcaaggcatatatacatatttttagttagcaacagaactaataatctaatatctaatatcaatctaataattaatatcaatctcatattgtgcatgcatatttgacatttttgataaacaattctaatattaggtggatttgggataaaaactgctgtatctatttggacagctatagagtgaactcttcctctagtttcctctagccccctgaatttagataagctgtagaacattgtacctctaaccttatagcatcatcttaaccctattattttccttttttgaaccttaatattgtatttctacccagttttactttttactgattccttcttatatggatttatatttgtaggtgacttatttgattgacatcctgaaacctcccacctttccctacttccttacagttactatgtaccactcaactgggataactccttttgactttctcacatcttcaatttctcaaagatgaaatcatggagtccttaaaataagatagaacataactactcaaaagaagatagagatctaatattaatatagttagaaataattagaaaaaccaagcattttgggaaaaaaaagaaaaaggaaaagaaactagcatttatcctataaaaatcccagaagaaaatctagaaaaaactcttccagacatcagcctaagacaagaatttatgacaaagaccccaaaagcaaatttaacaagccaaaaatagacaaatgggacttaattaaatgaaaaaggttctgcacgtcaaaagaaataatcaatagaataaacaggtaacctacagcatgggagaaaatatgtgcaaattatgcctccaacaaaggattaatatccagaatctccaaagaacttaaacagctcaataagaaaaaaagcaaccaatctcattaaaaactgggcaaaggacatgaacaggcatttttcaaaagaagaaatacaagtagccaaaaaacacatgaaaaaatgctcaacatcacttatcagagaaatgtgaattaaaactacactgagatattacgttaaaccaatcagaatggctactattaaaaagtcaagaacaacaaatgttggcatggatgcagaaaagggaacacttatatgcaattggtaggaatacaaattagtttaacctctgtggaaaacagtatggatctatcttaaataactaaaagtagaattaccattcaactcagtattcccactactagatatctatccaaaggaaatgatatcattacataaaaaatacacttgcactcgtatgtttattgcagcactactgacaaaagcaaagccataggaaccaacttaggtgtccaccaatggttgactggctaaagaaaatgtgatgcatatataccacagaatactatgcagccataaaaagaacgaaatcatgtgttttgcagcaatatgaatagagctgaaaacattgtcctcagtgaactaactcagaagcagaaaaatattgcatgttgtcactcataagtgggagctaaacaataggaacacatggacctaaagatggagataatagacactggagactccaaaaagtggggaggatgagaaggaggtaagggttgaaaaattacttattgggtacaatatttggacaataggtacactagagacccaagtcccaccacaatgcaatatacccatgtaacaaacaaatacatataccccctgaatctaaaataaaaataattttaaaagataaattataaaagaataacacattcattctacaaactgatgtgatatcaccactttagatcccgggtaactagtttctactcaacgtgagcacttatccaaaagagtacttactttaccagttgaacaacactttataaaactggtattatttgatcttaccattttgctttcttttgtatatgaatcctggcttctcttatcccttgaaccagtgtatctctaaatagaatccatggacccatcaaacgtgaatcctctgggttacttacaaaatacttatcctgtgtctgtctcattgcagacttcttggtttaaaataagcaaatattaagaaagtttgagaataattttctgaaatgttgttttactagtagtactactctcatccctgtgcccaattttcttttttctgagttggaggtcccactgtatctcccaggctatagtgcagtggcacaatcatggcttactgcagcctccaactcctccatgcctggctaagtttaaaaaaatttagagatggggtctccctatctctacataaaaaattttttattacataaaaaatacacttgcactcatatgtttattgcagcactactgacaaaagcaaacccataggaaccaacttaggtgtccaccaatggttgactggctaaagaaaatgtgatgtatatataccacagaatactatgcagccataaaaagaatgaaatcatgtgttttgcagcaatatgaatagagctgaaagcattgtcctcagtgaactaactcagaagcagaaaaatattgcatgttgtcactcataagtgggagctaaacaataggaacacatggacgtaaagatggagcaatgtgggcaacagcccacattggtctcgaactcctggccacaatccttgtgccacagccttccaaattactgggattacaggtatgagccactgtgtctggccatttttttaaaaaatgtgtttcctaacttgacttagaggttcatctgaaattccaactattattttatgtgctgatcttgttgactaattcctggtaactttatcctcttttcctgcaatagcaaaattccctacatctgagggcaaacttcttcttgtatttacttgttccacacagtgcatgcattcaacaggtctctgtcatttcatcctggctaccatcctctttactggacttgcattaattgtcaatgtggcataaacgtttattgcttatcgaacagccatgcactcctgcatatttctcagcaaccttgcagtgaggcatgccataaaactgctttggccaggggaatataaaggggaaaatgtatcattttcagaataaaatatttaaaagttggtgttcaacccgtcatatctcctttccccataaagaaccacctaacaagttcacaacagcctgaattacagtcacttagagcagcacagcttctctagagatctcttcttccaactcacatcagaatttgcatgaacatgcaatacatctttattgtgttacaccacagagattacagggccaatgttaccacagctcagcttagtctatacccactaacatagttaatgtaacatattaacctcttggtttgccatattaggctttgcagttctagtgagtttgttatgcaaatgagtcttttcctatctttgttgactgtttagctttgaacagattaatataagacatatacaatctgcaaggcgtttccagtaacttaggcttgtagtcattgatacttataatagaccttactaagtctcatgcagagcattgattacaacatttacttctttttgtttacctgagtccctccatgtctttaatgagttctggcttctatgactctaccttccaattctaagtaaaactcttctcctgggtaccttaaataagaccgttatagattaaggagtcaatgctaccccagggaacatatagtacattttagaacttaggtattcttccagtcagagcaatatagtcagtaactggatcatttttacctctctgatgtggatactagaccaatgccttagaaataataggtgcttaatgcatgatcgttagaatatatttgtaaacgtattcatctctttattttggggggattacttgccacttgagggaagggactatatcttatgtttaagttcctcacgatgtcttgttcatattaggcacttggtaaacatttaatttcaatttagcaagtaagtctatgttcaaattgaagagggttagcacctggggatgagatgtgactagtgagcctccatctgcttttgattctgatgaattagtgccaatgaaatgtccagaagcaacatctcagtgaacgatttatttactgtatttcctgctcctcccacattcaatatttagccacaacatttattggacaataagaatagcaaacaaatatttaaagcctctaatttcagtttggcttacttttgaaaattaacactctggcttttaaatgtcagtcaaatcaatacagactcaagactcacaattacctttcataaaataaatttaatttttgagtaaacacatatatacacttgtttatatatgagtatatatatattcatttttgaaaataagctaattctgctttaatgtttacctttactacaggaaagtttccacataaaaatgttgttactcttggaaaaaaaaatcactgcacctttggtatttaaaatgatttgcaaattattgtgatttattgctggtatagctggaatttctctgatcatattttctcatgtaactaaatagatattttcccattcatttatctactgaatggcccttgctctgatgacatgaacataataattaacaattcaatatgtcttcttcatctagaatcaattaattattgtatttagtaatgtgctttactccactatgaggcattctttctgcttgatgaatagtgttgtaaacattataaaacaacttgtagctttttctataatttctacttacatatggagttgtaagcaattttaatatgaatgttaaaaatctgaatatacatcattatttaaaaaaatacaagtttaaaagtatttttggttgagtttttaatattcttcaagttcaaacattacatttttgactgtttaaatgtacctagtgtgtagtaagtgcctactaggtacccaacagagtgatagacttaagaaatgaggaaaaggatccagagagaaatccctgctttgatggaactcatgatacagtcaatacgatgtgcataaactcaaaataccatggtaaatactcttataaggttacttaggaggagagcagaggggttggacctaacatcacttgagggtgggttgaggtagaagggagtgaacaaggagaaagtgtggggtcagggacaagctgaaaactgttatttctttcttttttttttttttttttataacttaacagttttctttttcacatttattacttttttttttaagtagagaaatacagagtaaagtcaggatggaaaggaagccattattacacttcttacctaacggtcaccaatgtggtaactgaaatttaatgctagtaagaagctttggatacaatgaaggtgtgtgcatcatctgttttttttttgttgtttttgtttttcattttttatttattattatttttttcttttttttaaatatacttttaagttttagggtacatgtgcacattctgcaggttagttacatatgtatacatgtgccatgctggtacactgcacccactaactcgtcatctagcattaggtatatctcccaatgctatccctccgccctgcccccaccccacaacagtccccagagtgtgatattccccttcctgtgtccatgtgatctcattgttcaattcccacctatgagtgagaatatgcggtgtttggttttttgttcttgtgatagtttactgagaatgatgatttccaatttcatccatgtccctacaaaggacatgaactcatcattttttatggctgcacagtattccatggtgtatatgtgccacattttcttaatccagtctatcattgttggacatttgggttggttccaagtctttgctattgtgaataatgccgcaataaacatacgtgtgcatgtgtctttatagtagcatgatttatagtcctttgggtatatacccagtaatgggatggctggatcaaatggtatttccagttctagatccctgaggaattgccacactgacttccacaatggttgaactagtttacactcccaccaacagtgtaaaagtgttcctatttctccacatcctctccagcacctgttgtttcctgactttttaatgattgccattctaactggtgtgagatggtatctcattgtggttttgaattgcatttctctgatggccagtgatgatgagcattttttcatgtgttttttggctgtataaatgtcttcttttgagaagtgtctgttcatgtccttcgctcactttttgatggggttgtttttttcttgtaaatttgtttgagttcattttagattctggatattagccctttgtcagatgagtaggttgcgaaaattttctcccattttctaggttgcctgatcactctgatggtagtttcttttgctgtgcagaagctctttagtttaattagatcccatttgtcaattttgtcttttgttgccattgcttttggtgttttagacatgaagtccttgcccatgcctatgtcctgaatggtaatgcctaggttttcttctagggtttttatggttttaggtctaacatttaagtctttaatccatcttgaattgatttttgtataaggtgtaaggaagggatccagtttcagctttctacatggctagccagttttcccagcaccatttattaaatagggaatcctttccccattgcttgtttttctcagatttgtcaaagatcagatagttgtagatatgaggcattatttctgagggctctgttctgttccattgatctatatctctgttttggtatgagtaccatgctgttttggttactgtagccttgtagtatagtttgaagtcaggtagtgtgatgcctccagctttgttcttttggcttaggattgacttggtgatgcgggctcttttttggttccatatgaactttagttttttccaattctgtgaagaaagtcattgggagcttgatggggatggcattgaatctataaattactttgggcagtatggccattttcacgatattgattcttcctacccatgagcatggaatgttcttccatttgtttgtatcctcttttatttccttgagcagtggtttgtagttctccttgaagaggtccttcacatcccttgtaagttggattcctaggtattttattctctttgaagcaattgtgaatgggagttcactcatgatttggctctctgtttgtctgttattggtgtataagaatgcttgtgatttttgtacattgattttgtatcctgagactttgctgaagttgcttatcagcttaaggagattttgggctgagacaatggggttttctagatatacaatcatgtcgtctgcaaacagggacaatttgacttcctcttttcctaattgaataccctttatttccttctcctgcctaattgccctggccagaacttctaacactatgttgaataggagtggtgagagagggcatccctgtcttgtgccagttttcaaagggaatgcttccagtttttgcccattcagtatgatattggctgtgggtttgtcatagatagctcttattattttgaaatacgtcccatcaatacctaatttattgagagtttttagcatgaagcgttgaattttgtcaaaggctttttctgcatctattgagataatcatgtggtttttgtctttggctctgtttatatgctggattacatttattgatttgcgtatattgaaccagccttgcatcccagagatgaagcccacttgatcatggtggataagctttttgatgtgctgctggattcgttttgccagtattttattgagaatttttgcatcaatgttcatcaagcatatttgtctaaaattctcttttttggttgtgtctctgccaggctttggaatcagaatgatgctggcctcataaaatgagttagggaggattccctctttttctactgattggaatagtttcagaaggaatggtaccagttcctccttgtacctctggtagaattcggctgtgaatccatctggtcctggactctttttggttggtaagctgttgattattgccacaatttcagatcctgttattggtctattgagagattcaacttcttcctggtttagtcttgggagagtgtatatgtcaaggaagttatccatttcttctagattttctagtttatttgcatagaggtgtttgtagtattctctgatggtagtttgtatttgtgtgggatcggtggtgatatcccctttatcattttttattgcgtctatttgattcttctctctttttttctttattagtcttgctagcagtctatcaattttgttgatcctttcaaaaaaccagctcctggtttcattaattttttgaagggttttttgtgtctctatttccttcagttctgctctgattttagttatttcttgccttctgctagcttttgaatgcgtttgctcttgcttttctagttcttttaattgtgatgttagggtgtcaattttggatctttcctgctttctcttgtgggcatttagtgctataaatttccctctacacactgctttgaatgtgtcccagagattctggtatgttgtgtctttgttctcattggtttcaaagaacatctttatttctgccttcatttcgttatgtacccagtagtcattcaggagcaggttgttcagtttccatgtagttgagcggtgttgagtgagattcttaatcttgagttctagtttgattgcactgtggtctgagagatagtttgttataatttctgttcttttacatttgctgaggagagctttacttccaaatgtgtggtcaattttggaatagatgtggtgtggtgctgaaaaaaatgtatattctgttgctttggggtggagagttctgtagatgtctattaggtcctcttggtgcagagctgagttcaattcctgggtatccttgttgactttctgtctcgttgatctgtctaatgttgacagtggggtgttaaagtctcccattattaatgtgtgggagtctaagtctctttgtaggtcactcaggacttgctttatgaatcttggtgctcctgtattgggtgcatatatatttaggatagttagctcttcttgttgaattgatgcttttaccattatgtaatggccttctttgtctcttttgatctttgttggtttaaagtctgtttaacagagactaggattgcgacccctgcctttttttgttttccatttgcttggtagatcttcctccatccttttattttgagcctatgtgtgtctctgcacatgagatgggtttcctgaatacagcacactgttgggtcttgactctttatccaatttgccagtctgtgtcttttaattggagcatttagtccatttacatttaaagttaatattgttatgtgtgaatttgatcctgtcattatgatgttagctggttattttgctcattagttgatgcagtttcttcctagtcttgatggtctttacattttggcatgattttgcagcggctggtaccggttgttcctttccatgtttagtgcttccttcaggagctcttttagagcaggcctggtggtgacaaaaatctctcagcatttgcttgtctgtaaagtattttatttctccttcacttatgaagcttagtttggctggatatgaaattctgggttgaaaattcttttctttaagaatgttgaatattggcccccactctcttctggtttgtagggtttctgccgagagatccgctgttagtctgatgggcttccctttgagggtaacccgacctttctctctggctgcccttaacattttttccttcatttcaactttggtgaatctgacaattatgtgtcttggagttgctcttctcgaggagtatctttgtggcattctctgtatttcctgaatctgaacgttggcctgccttgctagattggggaagttctcctggataatatcctgcagagtgttttccaacttggttccattctccccatcactttcaggtacaccaatcagacgtagatttggtcttttcacatagtcccatatgtcttggaggctttgctcatttctttttattcttttttctctaaacttcccttctcgcttcatttcattcatttcatcttccatcgctgataccctttcttccagttgattgcatcggctcctgaggcttctgcattcttcacgtagttctcgagccttggttttcagctccatcagctcctttaagcacttctctgtattggttattctagttatacattcctctaaatgtttttcaaagttttcaacttctttgcctttggtttgcatgtcctcccgtagctcagagtaatttgatcatctgaagccttcttctctcagctcgtcaaagtcattctccatccagctttgttccgtttctggtgaggaactgcattcctttggaggaggagaggtgctctgctgtttagagtttccagtttttctgttctgttttttccccatctttgtggttttatctacttttggtctttgatgatggtgatgtacagatgggtttttggtgtggatgtcctttctgtttgttagttttccttctaacagacaggaccctcagctgcaggtctgttggaataccctgccgtgtgaggtgtcagtgtgcccctgctggggggtgcctcccagttaggctgttgggggtcaggggtcagggacccacttgaggaggcagtctgcccgttttcagatctccagctgcatgctgggagagccactgctctcttcaaagctgtcagacagggacatttaagtctgcagaggttactgctgtctttttgtttgtctgtgccctgcccccagaggtggagcgtacagaggcaggcagacctccttgagctgtggtaggctccacccagttcgagcttcccggctgctttgtttacctaatgaagcctgggcaatcgcaggcgcccctcccccagcctcgctgctgccttgcagtttgatctcagactgctgtgctagcaatcagcgagactccttgggcataggaccctccaagccaggtgcgggatataatctcgtggtgcgccgttttttaagcccgtcggaaaagtgcagtattcgggtgggagtgacccaattttccaggtgccatccgtcacccctttctttgactcagaaagggaactccctgaccccttgcgcttcccaagtgaggcaatgcctcgccctgcttcggctcgcacacggtgcgtgcacccactgacctgagcccactgtctggcactccctagtgagatgaacccggtacctcagatggaaatgcagaaatcaccgtcttctgcgtcgctcatgctgggagctgtagaccggagctgttcctattcggccatcttggctccttcccccaaactgttatttcttaaagaatgagaaagttgttgccaaatggagaggatacagccatgtgaagaatcccagggagaaggaacagcatattcaaaagcatcagaacatatataccatgtgttccttgacacagattcaggccgacatgaccatatttcaggatatataggagacagaagaaggagataagactagagaaagttgcaggagtcataccacaagggtatcacaccaagacagagtcatgccaagacaggttagacggagctcttgtctaacaggaaacaagcaactaatgaagggtttttaataaggaattgcctaatcaggagaatttgtatcatcagatttcatgactggaaaacagaatcatataggaaatcactcgattactttcaccatctttataccttgttaataatagttgattttaacttaaatatcacaggctccactagctggtaattaaaactgtggtcacattttacagtaaggaacagcatttaggtgttctgagtccttacacactgactatcaggaaggtccttgctttctaggaagtttcctgtattaatattgtagagaaccccaaaggctttttagatattctttccctgtttggtgactagttaaggctgctttcttctattgagtcttctggtgtttggtggggcatagggtatcttactacccagtgttctgtgattcctctgcttatgtgcccagcgttggtctgctgtctcaggccactttcctcattactgctcttgccctggacttctgattccccaagcagtccctaggaagcctatgttactgcaggtctcttctatatcaccaaaatctgccatttctgtttaatttttaattgaggggttcaacagaaaagctgcttggggtcctagaagcaattatgtttttatgcaaaagttgttttcttctgagagaaaacaatcacttaggacaatagggctgctgagagaataagcatgtgtttatatagtaacacataggtcagggaagggaatctgccctaataggacgggtgagagaataagcatgtgtttatacagtaacacataggtcagggaagggaatctgccctacactgatagtctcttcagttcataatggtgagtgtttgttttctgagtcatctgtgtctccagttgtgcagggaaaaggaaacacagtttagcagaggtagttataattacagataagttttgcctttttggttcctaggttacagtcaaagcaatggatatttctgggtacctacttcactatctccctcacttcttgaaagttaagatattctaagatgtcttaggaggaggtgtcaccatagtctatatattggctaatttagctccggttcagctaatgaagtatacaaatattaatataaggcatctgataaaactgagatggccactggtcatgctattttaagaaatatttattgaacttccacaatgtgttgggtggtgcttctattgggtaagattattgttacagatcttcacattctccagtagatcactcctcggtggagagagccctaaaggcaagaagagaagtctcgttcttctctccatccttcccctgttttctaaagatagtaactacaagcaggtccctgggacatgggcatttgaaatgacatgggaaactatattttcatcctcccaaaggggcaggttttactttttgtgaccaaaagccaaatactttttaaatgtgatagatgctagctgctttttgatctgttctttatgctttcctttttggactttccttactccagatgatcctagtggaggtgtcattcatgaaatgcattagtttgtaagatgaggatgaggaacatatgacactaacagtcaaagacatgctaataacctgcctctccaaacaaggagctcctgatttgtagcactagcatttgtagtgtctctgtggtataaacacccccactctcccaccatgactgacttcaagctaataacatgacatcactagatgtggacatgggagaggggcatgaaattggctgtgccaaatttatacaagcctgcttcattaagccaccaccaacacaccaatcacgataccttctatccttctggacatagtgattggttcagaatcaggtacataagtccagacaagactgattaacaactttctgaggaatctgtatggatgtttgtgggcaaagggccattcactttcttctggaattaaggctgtgcagacaatgtaaatgaacaacagctaatcaccacatctgctaccctaggaagagagtgtatgtaaaactaaggcagagaggatagtacagccatgaagtgaagagagtcctgttgacaatttgaaaccctgtgtctagttttacctgaccggaatcagccctctgagactttctgattacataagcaaatgaattcacttttttacatacgctaatttaagttgggtttctgtcacttgcaagcaaaataatcttcatcctaacgaataaagaatgtcttagaataggggatttatatttttgcattctgaaaatagaaagtttagaaatctttggggacccagctatagatgattaggcgttctctaaatagaggggatgtataagaaaaaattgaaatttccttgggaagcaaaacaagtcaggagaccacaaagcaagggggagagtgtctcaggcctagagcctccaggaacagtatcagccaggggactgggccagggactttgagcttcttgagccagagggctgctctatggcttttaaaatcaattacatatgaaaagctgatatgatttcatatgtaattgatttcaattacatatgaaagaagtgataacagtctcctggatgataaatgcaatcttctccaaaaattctaccctttacattatcgccagagttatctttataactgaacatctgatcgttccacttagatgtaaactgctttcataacttccctttattttggtagaaaaaaaatcaaaactctatttcatggcatgtcagaccctttgtaatttggctttttatagtactttatttctatttccttttgctttcctctaaacacctacacacttatccttttgcacttcctggacccctgaatagaccacatgcacatggactgcacatttgtgtacctaaaagatacttaccctgctgtcgacctcgttaagacctactcactgtctatgtcctagcacaattattgtttcctaaaagaagcatttccagactccttcaggtgcgtataactttctcctccattctctgttaccactgtacctgcctcattattgtcacaagtataactgttttacttagttctggctgctataacaaaataccatagactgggtggttttaacaacaaactgttttttttttttttttttttttttttacggttctggaagctggaaactccaagtttaagacactggaaaattcagtgtctgttggagtcccacatcctggttcatagagagccattttctctgtgtgtcctcatgaggcagaaaaagagctagaaagctctctggggcctcttttataagggctgcaaccgcatccatgatacctccaccctcatgacttaattccctcccaaaggtcccagctactaatactactgcgttggaggttaaaatttcaacatatcagtttggcagggagagggggcattaacattcagttcataacaataagtttgttttcttctttgtttatttatttttatgattgtttcttactagactgggagactcttgatgatgcgtaattattgagtaaatcacttaaaaatgtagcctaaaggttatttacaaatacaacccctttagatcatccaattggtgtttctttctggctttagagtagcaggcaaatttggtttcataatatttataaatgtcagatgttctgcaaggaagtagaaaaattatgaagacatggctcaagagtccttgaggctattacatgcaagagcaaaagaccaggaaagaagtagatggatggaatagctagacagatagacattcacggtataaaggaggtacatacaaacttcagtgatagctcaagaggcactgtggctagatgagctgcatgaggtttcatagagaaagtgactaaactaaagagcttctgcgcagcaaaagaaactaccatcagagtgaacaggcaacctacaaaacaggagaaaattttcgcaacctactcatctgacaaagggctaatatccagaatctaaaatgaactcaaacaaacttacaagaaaaaaacaaccccagcaaaaagtgggcaaaggacatgaacagacacttctcaaaagaagacatttatgcagccaaaaaacacatgaaaaaatgctcaccatcactggccatcagagaaatgcaaatcaaaaccataatgagataccatctcacaccagttagaatggcaatcattaaaaagtcaggaaacaacaggtgcgggagaggatgtggagaaatgggaacacttttacactgttggtgggagtgtaaactagttcaaccattgtggaagtcagtgtggcaattcctcagggatctagaactagaaataccatttgacccagcaatcccattactgggtatatacccaaaggattataaatcatgctgctataaagacacatgcacacgtatgtttattgcggcactattcacaatagcaaagacttggaaccaacccaaatgtccaacaatgatagactggattaagaaaatgtggcacacatacaccatggaatactatgcagccataacaaaggatgagttcatgtcctttgtagggacatggatgaaattggaaatcatcattctcagtaaactatcgcaagaacaaaaaaccaaacaccgcatattctcactcataggtgggaactgaacaatgagaacacatggacacaggaaggggaatatcacactctggggactgttgtggggtggggggaggggggggatagcattaggagatatacctaatgctaaatgatgagttaatgggtgcagcacaccagcatggcacatgtatacatatgtaactaacctgcacattgtgcacatgtaccctaaaacttaaagtataataataattttaaaaaaagaaaaaaaaaaagaaagtgacttttgaatggggtcttgaagggtatacagaaacttttccaaaaagaaaaggaaggagggaaatcttattgcagaaagaagggatggtacttgtaaaatcacaggtatatgcaggatgatcatggtgtatactatacccagtgctatggtcagaatgtttgtgtccctccaaaatccatatattgaactcctaacccttagagtgatggtattaaggaagtaggatctttaagaggtgattagatcatgaggggcaagtcatcatgaatgggattagtatcttttaaaaagaggtaccaggaagctaccttgccctttttccataggagatgacaggctctcaccagatactgattcatccttgatcttgaacatcccagactccagaactgtgagaaatcattttctattgtttataagatactcagtttatggcatttttttatatcagcctgaacagactaagacagtcagattagtgtggccactgtgtgatatttagctcagttcctagaatacagtaggtgttcagtaaatgttcaatgaatgaatgaatgtaggctgcatgaataagaatgataggacaaatatgcggaaagtaatttgggacctacattggaaggatcttaatttgtcaaggtaagaccttagtaattcatccaggcttaaaataagtcattatttcttggtggttaagcctgagcactatttggactgcccaggctgaatgctggttccatcacttaccatttttgtatctgtaggaaagcctaaatctcagtttattcacccataaaatggggaaaataattacatacattttgtaggttgctgtgaggattaaagagtttagaacagagattcattcaatgtgaatccctgataaaggctaattactattgttattaacactttatgccctagagagcatttgaagaattttaaaggaaagaatgacaagagtagattttattactttaagatgctgcagggctgttggcatgctcaggtacacagaatgccaccttgaaaatttttttttcagactctcttgatttgggataaaaaatttcttacaaccccatgaaaaacattgctgatttcaaaaagagtccagtagcaaaaagagtccagagtatgaaaaagaaccagtcaaatcctgggactagataatgatatatatcactggttgcaaaaactcttagccctggagaaagaaaacagtagcttggaaataggactgaaataggactcttaggaatgagagtaagaaaggctagtattaaatttcaagtttaaccaggcatagaagaacaggcaaagggaattagagaaaatggaaacatggctaaatgtccaacaacagttaccaaaagaggaaaatgcatcgaaatatgtaactatctcagtgctcctaattctaccttttacccttgaaggacagctccagattctatcatttgggataagtgcagctctgggtggtatgacttttgcatgaagcctgatgcaaaatgcagtaacaagaaagagtgagtgaccatggaggttcccaacaactttctgtaactttgacctgagtcctttaactatggctggagttttaacagctacatattagtgaatgacactaagaaaaagcataatttctagcacctatgcttccatacctaacaatgccttaggcattaatgtaacctgattgtagggattgacagctctggtatatcatgtaatttgggagacaaagaggaagatagtactcggagtagtggtgtctagattattccttgggggttttgtgagattaacacctggggtgtaaaaaaaagtgattttgtagtcatattagtttggaaatagtggctcaaacagaattaagctagtttatttatgtgtaggtcttctcagatgcttactatgccaatgtttatgattagttttctgaagggaagatctaggcaataggaaagacagcaaggcatggagtataaagttttgctctcaatatggccaatctaatgagagagacagaaaagtaatccaactatagcaatagtttgtgaatacttctgctgagtggaatatcttgcttaccacttacctcttcactaatggttttgaatgccaaaaccaaaccaattgtcttactggcatttgcctcttgtctgcacagtgacatcagaattcagttaaataattaaagactgttaggcacgctggggacagctcagtcttacatctggcccttgttttacaatcagttctttctcagggatcctagtctaaattctgtcttctagattcaatgctgtatacaagacaaaatcatgagatttctcatgatttctttcaaatgtgtagaattcctagaatcagagacattagaataggaggaaatgtaagttaccatcatattgaatcccttcattagatatcatcgtgttcactgttggtgggactgtaaactagttcaaccattgtggaagtcagtgtggcgattcctcagggatctagaactagaaataccatttgacccagccatcccattactgggtatatacccaaaggactataaatcatgctgctataaagacatatgcacacgtatgtttattgcggcactattcacaatagcaaagacttggaaccaacccaaatgtccaacaatgatagactggattaagaaaatgtggcacatatacaccatggaatactgtgcagccataaaaaatgatgagttcatgtcctttgtagggacatggatgaaattggaaatcttcattctcaataaactatcgcaaggacaaaaaaccaaacaccgcatgttctcactcatagatgggaattgaacaatgagaacacatggacacaggaaggggaacatcacattctggggactgttgtggagtggcggggaggggggagggatggcattaggagatatacctaatgctaaatgatgagttgatgggtgcagcacaccagcatggcacatgtatacatatgtaactaacctgcacattgtgcacatgtaccctaaaacttaaagtataataataataataaaaagatatcattgtgttcaattccttaattttatacaagagtttcctaaatatgtaggtctagacatgactggcatgtatagctgcctgagttgtacactgcacaactgcaaggtgcctttcactagaccataatgtgaatttcacctcttgaagtaatctgtgtaaccataggtagtgaccttggcttagacatacagttttgttttctcctagaagagatagctatggttttaaaatgcctaagaatagtgattaaagtgcaataatcaaagaagcataaatcccaacatctgaaaggtatattatgcttctaaaacacaatgttctattataaaataaataaattgggtgaacatgtggcagttattcagtaaaaaaaaacttgtataatattagtagtttcaaatttttacttcctatatttagtaagtgattaaaaaagtaataaagaaggtgggcaggaagagtggagccgcagagagtgacactgagtgttcaggaagagtatagaagcaaaaaaaaaaaaaaaactactcagtgaacatctaatggaaaaccagatgtcaaaataacaatgaaatatataaatataatctcagttttatataattatccttggtgagtcatctcatgtggcttgcaagttacaaatagagtaagccaaatttctcttcttaaataagaaaatttaggaaacgaaagttttaatgtgttttctgacacctcttggaagttaatttccagaatgcctaacacagatagcatcaccaataaatctcagtcttatgcctgctgcagctttatgatctgtctccactaggcttgtcaaggtgctcaaaacataaatagccatcaggaacagaagctgtcttctctacaccactgtgaggtttaccttgtcagagaggacttagatctctcaggcattggaggggactgcacagcattggtaggatggctctacttccttcacttgctttacttatttctcactgggctgtgatgacattgagtacagggactctattccatcctgggccacacagcagacactcaataaataattgtcgtgagagagaaagttgtagcctctttcacctatcatttgagaatctcagctccagtccctggaagctgtttgttcatgcctattaagccccaagcctactggcattctacaaggtccaaaaggctattttagccaagatagatgtttgcacagcttcgtcacttttctggcaagagtagaagtggacaacgctaatattcattctggatcagaatcaggaattcctgtttgcttagtttccagagataaatcttcctgtacatagaaatgtatcatgttgatgcttctgatgggcaggatgcccagagcttcattgagttatcaatgtttccacttgatctattgacaatggaggcttgaaagtaaacagctttgccgattccaaatagctggtttgaggctgggcaaacaggaaagctttgcacaaagctaaaagctggcacagggcttggggttttcagtaagtttctgcagttggttttaagaagagaaaaagaactctggattataaaattagggcagcagattggaccttgaatttaattagtgtgtttagagataactaacccattcaagaaatgaggtagtgctgtacaatagtgagagaaaaatggattttaagtctaaggctaccattcagggaaatcatctatcccttctggtatcaaatttctatatttctaagaaaaatatagtgacagcaaagatgacttgatagaaagggtggggatgagtactgccatgagaattcagtaacctggattctgtttatggatatataaaacttgatatggtttagctttgcattcccactcaaacctaatctcaaattgtaatccccatgtgtctagggagggaggggaatggatcatgggggtagtttcccccatgctgttcttatgatacagagtgagttctcaggagatctagtgtttgacagttcctccacactcagtcacactcactgtctctgctgccttgtgaagaaggtgcctgcttcttctgccatgattgtaagtttcccgtggtctccccagccactgtgagttaaaactctttcctttgtaaattacctagtctcaggcatttctttatagcagtatgaaaatgaactaatacaaaactcaagacactactcagcctcatggagctttgtttttctcgtatgtaaagtggtaataataaccccagcagattacctggaaataatgaacttgatattcaacagcaacatagacagatgttagaaattttatactgcataagggaagcaagaatcagaatacacacaaaatattgtatgtgtgtgtaaagttgacatatgtaatgaaaaatggacagagaccctataaatggattagaattagaaactaatgtgaagagggagaaatgagtgctaaaattaatggaagataaaagtaaaacataaaaattgtctgacatggaccttagataattgtactcctgaattgactcatatgattaactcaattctgtggtccacaaaggggaaaaataattttgcaaataaatctataattagaaactataatagccggtatgaatcaaataaaaaagatgctatgattaggaataggcaggggtagggaaagctctaacatagatgttaaagtgagtcagaggaagagtataggaaaggacattccagagagcatgaatagcctttgcaaagtttatgatgttgcaaacagattgatgcattcaagaaaccaagagaaccatgaggctggtgagtgaagaccagaatggttagaggtgagcctgaagtggtctgagagggcaagttatgcaagaccttgtagaccacgtaaagaagttgcattttaacctaaatgcaaggaaaagccattaggggttttaaatgcaagggctggtggataataatgaagacggtgggaagagaatgtatgtggcggggtcagatttttgttgaaaaactgtgctcagggagccaaagtggatgcagacagatctattaagagcttttttggagcaatccagatggactatgagtgatttggtcaacagtgtgggcaatgggaatgtagataaatgattgattagagagacacttggaggtaatatcaacatgtcatataagtctaatatgtctttgttatagactatatatgtgttcaaattatttgctcctcattttcactggaggattatacatccctttctgactgacatcagaaatagtcatgttactttttttgctgatgaagtgtggatgaatatattatatgtcatgtctaggtagaatctgtaatagccagtggatgttttgctctacttcgcatttcctttgacatgacacaaacaatgcatcagaaaggggcttccttaccaaagtgggtctcagaatgattgtgatgcgtgacagagccttaactgaccagtgaaaaaaatgagtgagaacttaactttcttgctcaagtgcacatcaaatgtttggtaagattatattatatgctgggctataaaacaaatcttaatatgttttaaaagagtaaaatcaaatagagattgtccttttaccaaagtggcattaaaatttgaatcaataactggacaatgtctgaaaaatcctcaaataattcaaaattaaatgacttaccaggggataacccatggattaagtaggaaacaaggaaaattgtgaaatattttgagtaaataaaaatgaaaacaatatgggaaaatctgtaggaagcagctgagaaaaatataaaatttaaatgactatattggagtgaagaaaaaaaatcaatgatgtgtgatttcaccttaaaaaggtagtggtgatcatttaaaagtcaggaaacaacaggtgctggagtggatgtggagaaataggaacacttttacactgctggtgggactgtaaactagttcaaccattgtggaagacagtgtggtgattactcagggatctagagctagaaataccatttgacccagccattccattactgggtatatacccaaaggaatataaatcatgctgctataaagacacatgcacatgtatgtttattgtggcactactcacaatagcaaagacttggaaccaacccaaatgttcaacaatgatagaccagattaagaaaatgtggcacatatacaccatggaatactatgcagccataaaaaatgatgagttcatgtcctttgtagggacatggatgaagctggaaaccatcattctgagcaaactatcacaaggacaaaaaaacaaacaccgtatgtcctcactcataggtgggaattggacaatgagaacacttggacacagtaaggggaacatcacacaccggggcctgttgtggggtagggggagggggaagggatagaattaggagatatacctatgtaaatgacgagttaatgggtgcagcacaccaacatggcacatgtatacatatgtaacaaacctgcacattgtgcacatgtaccctagaacttaaagtgtaataaaaatatatatatataaaagaaaagctaaattaaacccaaaagaagtagaaaaaaagtatttagtaaaatatgtgtggaaataaaaaatagaaaatgggcaaaaatatagaaaattgaaaaaatcaaaatttttctttgaaatgtttcatagattgataaaacctagtaagactgattaagaaaaaaacaaactaccaatctcaggaatgaaagacaggacatcatcacagtttccacaaacattacaagaataataaggggaagggttactatatgaaaaattttgtgtgagtaagtttagcaacttagatgaaatgaataaaaattccctgggtaatacaactttgccaaaactaacattagaagaaaaatttaaaaatctgaatgacatatctatttaagaaactgaattaaaactttaacattttcacaaagaaaatgtcaaagatttgttctttgtgcttaggattgtcttggctatacaggctctttttgcttccatataaaatttaaaatatttttttctaattctgtgaagaaactcagtggtagcttgatgggaatagcatggaatctacaaattactttgagcagtatggtgattttcattatattgatacttcctatccatgagcatggaaggtttttccatttgtttgtgtcctctcttatttccttgagcagtggtttgtagttctccatgaaaaggtcctgcacatcccttgtaagttggattcctaggtattttattctctctgtagcaattgtgaatgggactttgctcatgatttggctgtttgtctattaatggtgtataggaatgcttgtgatttttgcatattgattttgtatcctgagactttgctgaagttgcttatcagtttaaggagtttttgggctgagatgatggagttttctaaatatacaatcatgtcatctgcaaacagaggtaatttgacttcctctcttcctatttgaatacctttatttctttctcttgcccgattgctctggccagaacttccaatactatgttgaataggagtgatgagagagggcatccttgtcttgttctggttttcagtggaatgcttccagcttttgtttattcagtatgatattggctgtgggtttgtcataaataggtcttattattttgagatatgttctatcaatacgtagcttattgagtgttcttcagcatgaagtggtgttgaattttattaaaggccttttctgcatctattgagataatcatggggtttttgtcattggttctgtttatgtgatggattacatttatcaatttgcatatgttgaaccagccttgcatcccagggatgaagcagatttgatcatggtggataagctttttgatgtgctgctggattcggtttgccagtattttattgaggatttttgcatcgacgttcatcagggatattggcctgaaattttcttttttgttgtgtctctgccaggtttggtatcaggatgatgatagccacataaaatgggttagggaggagtctctctttttctattgtttggaattgtttcagaaggaatggtaaaagcttctctttgtacttctgatagaattcggctgtgaatccatcgagtcctgagctttttttggttggtaggctattaattactgcctcaatttcagaacttgttattggtctattcagggatttgacttcttcctggtgtagttttgggagggtatatgtgtccaggaatttatctatttcttctagattttctagtttatctgcatagagatgtttatagtattctctgatggtagtgagtatttctatgggatcagtttttatttttcattttttatcattttttatcacttatcattttttattgtgtctatttgattcttctctcttttcttttttattagtttggctagcagtctatctagttgttaacttttttaaaaaaaaaacagctcctggattcattgatttttgaagggtttttcgtgtctctatctctttcagttctgctctgatcttatgctacctgacttcaaactatactacaagactacagtaaccaaaacagcatggtaatggtaccaaaacacatatgtagaccaatggaacagaacagaggcctcagaaataacaacacacatctacaaccatctgatctttgacaaacctgacaaaaacaagcaatgaggaatggattccctatttaataaatggtgttgagaaaactgtgaagccatatgcagaaaactgaaactgggcctcttccttacaccttatacaaaaattaactcaagatggattaaagatttaaatgtaagacctaaaattataaaaatcctagaagaaaaccttggcaataccattcaggacataggcatgggcaaagacttcatgtctaaaaaccaaaagcaatagcaacaaaagccaaaattgacaaatgggatctaattaaactaaggagttctgcacagcaaaagaaactatcatcagcctgaacaggcaacctacagaataggagaaaatttttcacagtctagccatctgacaaagggctaatatccagaatctacaagaaaacaagaaacttaaacaaatttacaagaaaaaaacataaccccatcaaaaagtaggcaaagaataagaacagacacttttcaaaagaagacatttatgtggccaaaaaacatatgaaaagaagctcatcacaggtcattagagaaatgccaatcaaaaccacaatgagataccatctcatgccagttagaatggcgatattaaaaagtcaggaaacaacagatgcaggagaggatgtggagaaataggaatgctttaagactgttggtgagagtgtaaattagtccaaccattgtggaagacagtatggtgattcctcaaggatctagaaccagaaatgtcatttgacccagcaatcccattactggacatatacccaaaggattataaatcattctataataaagacacatgcacacatgtttattgcagcacttttcacagtagcaaagacttggaatcaacccaaatgcccatcaatgttagactgaataaagaaaatgtagcaaatatacaccattgaatactatgcagccataaaaaaggatgagttcctgtcctttatagggacatggatgaagctggaaaccatcatcctcagcaaactaacacagggacagaataccagacaccacatgttctcactcataagtgggagttgaacaatgagaacatatgggcacagggaggggaacatcacacactggggcctgttagggggtggggagcaaggggagggatagcattaggagacatacctaatgtagatgatgggttgatgggtgaagcaaaccaccatggcaagtgtatacctatgtaaaaaacctgcacattatgcacatataacccataacttaaagtgtaataaaaaaagaaaatgttaaagatttgttttcaaagtttatatgttaatgcaagaccctaaaatagacctcttttccaccaccaacaaaaaacttaaaaaaaaattgtattttttatactatctgatttcgagattctctataacagtaatcaaggccatttggattgtcaaaaccatacacatttaaatcaaaagaatagagtggaaggtctaaaaatgaactcacacatatatgtaaaaatagaaatgtgccatagcaattcaatgtgtaatgcaaagtgttcttaacaaatggttgaggtggacacagagtaatcagatacaaaggaacaaatggatatctccaaagataaaatgaaactcaaaacctactttatgctatataataaaatttattttaggtgtaatgcatacatactcatgaaagcataatctatcaaacttttcaaataacacatgaaagaatatcttcacaaccttgaaaggcccatttttcttttttttggaaaagatacagaaaagacagaacatgaaaatattgatgaactgaacttcaaaattaaaaacctctgcacatcaggaaaacaagtaaggaaacaactggatgaaaatattcacaacttatatatttgactaaggacttcaagccatgatatataaagaagtactataactcattcataaaaaaaacttgattaaaaatagcaagatttgaaagaacacttcacaaagaaagatgttccagtgtttaatgggcacctgaaaaagtgctcaacaccagtaatcaggtaaatgtaaactgaaaccaataatatcccactatatactcactatatatccacattgttggtgcagctgtaaaatggcacaactgcctcagaaaactgctatactgcttagctgtttttaaaacatttattctatgattcagcaattccattccaaggaagataaaatcatatgtctgctaaagacttgtgcacacatattcacagcatctttattcacagtcgtcaaagactgcaaacaacgcaaatgtccaacagtaagagacatcaacaggaatatgtcatttcctgcatcaacaataccttcactcagaattccaaaatgggtttccaaagttgggcatttctgataagtttccaggtgatactgatgctattagtacatagaccacagcagagaaccactgatgtagattgtaagcaccaggctgcagggatcccatctgtcttacctactgctgattcccatcagctatacaaggcacagagtggccaccactcaggataaacaaaaaagcaagctggtatatttatgtatttccatattacttagcaataaaaataaagtaactactaatacattatacaaacaaaccttttcatatggccttttaaaacccagttctacattgcttatctttacctctggttttagccttcttatgcctgcctcctctttagtcactaagccccggcaccaacatcttccttttggttactcataagactcatgatattcagagaaatgtgaattaaaatcacaaggaaatatcatcttacaccagtcaaaatggttattattaaaacatcaaaaaataatagatattggcgaggatgcagagagaaggggaagcttatatactattagtaggaatgtaaattagtacaatctctatggaatacagtattgaaatttctcaaagaaccagatttctcaaagaattaccatttgatccgataattctgctactggatacctagctgaaggaaaataaatcactattaaaaaaagacacctgcggctgggcacggtggctcacacctgtaatcccagcactttgggaggccaacgtgggtggatcacctgaggtccgagtttgatgccagcctggctaacatggtgaaaccccgtctctactaaaaatacaaaattggctgggcgtggtggcgcatgcctgtaatcccagctacttgggaggctgaggcagaagaatcgcttggacccaggaggcagaggttgcagtgagccgagattgtgccattgcattccagcctgggcgacagaatgagactccatctcaaaaaaacaaaaaacaaaacacacacacacacacacacacacacacacacacacaccaaaaccaaaaccaaaaccaaaaccaaaaaacaaacaaaaaacacctgcactcctatgtttattgcagcactattcacagtagaaaagtcatggaaccaatctaagtgttcaccaaccacttactggataaagaatatgtaatgtatatatacacatacatacacacatacaataaaataaacacaataaaatactactcagccataaaaaatgagatcatgtgttttgtagcaacatggatggaactggagaacattattttaagtgaaataatttagaaaaataaagtcaaatactgcatgttttcacttataagtgggagctaaataatgtgtacacatggtgatcatagagaggataatagacattggagcctcagaagggtgggagggtgggagggggttgaatgatgagaaattactcagtgggcacaatgtacactattcaggtgatggctacactaaatgcccagacttcaccactgctcaatatatttgtggaacaaaagtacactagtatcccctaagtctgtatttaaagaaaaaaaaacttgatcgaaagatgaatgagaatttttgtagcatggaacatgttcttccctatatcaagaatgctggctgggtacagtggctcaagtctgtaatcccagcactttgggaggccgaggtgggagtatactcaagctcaggagttcaagaccagcctgtgcaacaaagcaagacccgaccctgtctccacaaaaataaataaataaataaacaaataaataaataaatattcagccaggtgtggtggcacacacctgtaatcccagctacttaggaggctaaagtgggaggattgcttgagcccggcaggtcaaggctacagtgagctgtgatcgtgccactgcgctctagccttcacaacagagtgaaacttgtctcgaaacaaacaaacgaaacaaaaacacacacacaaagaatgccttcactcttcctcattcactcacccttctaccacttctaatcttcctcaaagcctactctattttccttgatatattattatcataatttccaaaggatgaaatattgtatcagtaaaatcttcttatatgtatacctaccacatagatcctaccattaacactttattatgcttgctttattacatatatattattatccattcttctatttaatggcccacttttattctaacagttcttcaggggcacttgctctgaatccccagagaggcaaagacttcacatcctgtcctcatactctctcttacaatttctcaactttctgttacaccacttgatgtaattatcataaacaactttgtttaatatttgtcttctctggtagagcagtgtgattctcaaaattgagcttgctttaaaatcatgggaaggctggctaaaacatagattactcaaccccaccttcaaaatttctgatatagcagatcttggatggggtccaaaattttgcacatctgacaaggtctcagatgatgctgatgcttctggtccatgagcaccatgctgcaggggtcatgtctgttggtcttactactgagtcctatcagctgtcgtaaacacagagaaggcactcaggatataatatagatttattgaatgaatgaaccaatgtttatgtgtgtgtgtgcatgtttgtgtgtgtatccttttcatgtaatataacataggtattccttatagctatcgctgtcaatgaataggttcatcaatctgtgtatcttgtttatgtatcttcctctattgttatatacttaaattgttcccagttaatcccgttatatttgatactgtttccaaacaggccttgatttttcacgggaatttcttcacatcataattaacaaaggataggtacacgatcttattttttttttattttccttatggtcccagattataaaactcagcatgttattttcagcttaaatgaagtaggaattatgatttgcaaaggctcctttcttaagggagtggagaaaaaaaatcagcatactttaattgtgagataatatttgtgtgaagttttccgtgcaggtgtgaaggtgggaggtaatgcaacagaactggcctggagctgtcaatatgccattatcataaccgtgaagcacctggttctaaatgaccaatgtccaaaagggttctacagtaaacaaggagttgcctggccccacccatgaattcttcagataaaggattccaaagcagtcctggaggtgaacaggacttttaaaatctgcttatgttatggttccttggcttcagtatgaaaattaaaaggcaaccttttaataacttctttgactttctatagttatttataccatattcaaatgatggaaattttcccaaatgatttttatttcctctgcattggaaccagggaacaaaatcagcacaggtgccattctgatgtcctattggatattggaagctgtgttcctcattgtaaagcacttatgaacctatttacaatgttctgtattcaacacaagataaagttaagtagatggcaaaacattcatctagtcttaaatttatccaacctccttttactgaatgtctaccttgttccaggtattgtgagaacacaagttacaggaagcactatctttcctcaaggaacttaagagtctaacagggaatggagttattaatctcagtgcaatgtgatgtagtctttaggtaaaataggcattggtcttgctggggaaagacaagcatttaaatgagactgaaacatcaggggaggcacttaactgagttttgaagggaaagtagttttagtatgagaagggtggtgaaagccattgcaagtgaagaatagcatctaggtccaaaacggaataaagcattccaaagattaagaatgtttcaatggagttaacatgagattgcttgtacaagacagttcagaaattattaaacagattggccaaggtcagatcaggaatggcggagaaacttaccagccaggtctggcctctgcctcttcagcctcatttcattacttcctctttgttctctgtgttacaggccctctggccttcaattattcctcccaaatctcaagtttccctctccctctggacctttacacattgcctgggatgttctttcatgcattgctcttcatcgctcttcctccttctccatcagatctgggtttcaattgtactttctcaggaaagacctctctgatcctacagaagaagtcagtctctagcttgcatcccttctgttcgctatattcttctggcatagcctgtatcatgtttgatatctaggaacatgatcattttcacactattccataagctcaagcagggaagagaacatatctgttttcctcaatattggttcctgttttaagcagaatttcttgcatatagcgggtgcttagcaaatatgagaggaaacaatatttgttccatattgataagccatgctatatgcatgtgtgtgggtgtatacacaatttttttacttaatccttccccaaactctttgaggtaggtaatatatatttttctgttttacagctaaaataacttgggttaatggaagttaattttcttaaagttgcagcatgacctcatgccattatatgttgtatgtgtttctctttctgtcaatcccatgaccactaaatgctacccagaagtaaagcagtaatttttgtcatctgagttctcaattcctctgtgagtttttaaaatttctacttgcaagcaagaaagtctaggccattttattgtcggtttccatttagctatgtagattcttctaatacatcactaacattgttgacttctctatttcccctgtctgtgtatactgtgaggttctggaaaacgagacttttttcctgttcactgtattactactctcaagtacctggtgtgcaatgggtacttaagttagtgctgaagtggcttgtatgagatagtttagaaattatcacacggttgtccaagatcagattgtgaactgcagagaaactcattcacttagtgtgtcacctacccacctttacatttaagttaaatagctaagttatattgttcagtcccaagtgtatgtattgagtacttgctatgtggtaggcactattctagactccagggatacagcagtgagtaataccagtgaagtccaagatgctattaccatggagcttatgctctactgggagttctagtagagccagcctttcgatttagcaagtcttttacagactgttgctctatgccacctctctaatacagcctataaaaaaaatacatattttttctctaatgatcacatttagccttattcaagcctcaggcattgctctttccctgagagaattcttaccagtttgtaacatgacccaaattttcttgccattttcaaaagaaactattgctttcattttcatcccctccatcattgcattactatttttaaaagttttgtctcttccaacagcaattagcatatccccctgtagttcaaccaaacatctcagctttggaggaattaagtactgagtttttcaagaaacccaggaaagaaggaagggagagtgagagacagtgactttggagagaacagggttgaggaaatgttttattttgaattttttaaggtagtagatatttcaacatgtttgtaggatcaagggaagaagccaatgaaggaggcttgaaatatccaacagacagaataattgatggagcaatgctttagaggagaaaaagttgcaaacataggtgggggtaccattgagattttagaaagaaaatgtcaatatcttctttcggagaggcaaaaaagaaaaagaaaacaaaagttaaaagaatgcacacatttcagaccagagggaatgtgattcagaaactatgttctatagttattctcccaaagaaattgtaggcaaggtcttctgatgaggggatgggggaggggtgagaggagaattgataactgaataaaatgaaaaatatttagaagaatcatagtgaaaagccgaaggaggaaaccaaggttttgtaaaagagtttccagacataattaaagacccaaccaggacagaagttatatgatgttatgtatcttgagaacaaatcctgtgggtaagactatacccttcagcttccaccctcctcaaaactgtttttattttattcatttatttattttgtatgatttccttcagtctaccactcttcatggaatccttttggaaataaaatttgtttaccacaacgcaccttaacacctacatagctgggatcaggaaggaactagcaagggggtaaaactgggactaagaggactaattttgattgcccttagcttggcccttaggaggatgtgaaattcagacatttaccccatcctaacagaaccatagtctcagacatagttcagataatccccaaatttgtttatcacaatttaataaagaattaaattttatatgcccagtaggcaaatagacaaaatcttggccatttctttgttttctttcttcttcaaaatgcttatttgcagataaatattacatcttaacttaggaggaagaaattcaggcctttgttactcaaattccatagtttagctgatttttctaaatattctcttaataataaattagagactacatctttgcaggtagcacatttacaagtcattgtcttcatgatcttgaccagctccaagtaatgtcaagaacaatgcaccttatcacccaggcaactgggatcaggaagaaacttgcaaggggataaaattgggactatgaggactaattttgattatccttagcttggcccttaggaggatgtggaattcagacatttaccccatcctaacagaaccatagtctcagacttagttcagataattcccagtgccaacagagtccaagacagctgtcttagtctgcacaggctgtaccgtagttcaaatatttgtgtccctccaaattcatgttgaaacctaatcatcattgtggtagtgttacgaggtaaagtctttaggaagtggttagtccatgagggtggagctctcacggatgtgatttgtgccctcatagaagaggcttgagggagccttctgccctttccaccatatgaagctgtaatggcaaagtgccatctttaaagcagagagcaggctttcaccagatactgaagctgctggcaccttgatttgtacctccagcctccagagctataagcaagaaatttctgttgctataagttgcccagcctaagatattttgttatagaagccccaacagattaagataggctgccataacaaaataccatggactaagtggtttaaacaacataaatttatttcctcttagttctagggactgaaagcccaagatcaagttgcgtgcatgaaaagagagagagggaggaagggagagagagagagagagagagagagagagagagaaagcgagaaagcgagaaagcaagggagagagagggctaggcctctggtttcttttcttataaggatattaatcctgtggaaccagggtcccatccttatgacctcaatttaccttcactacttatttagcagtttcatgtccaaatacagccacactggagggtagggctacaacatatgtatttaatatggacataaacatttaggccataatactagccaagagggcaaagcaagaattcccacccaaaacagtcataagcataaataacatattatcactgtgatttaaggccattaataaatccactgctaactagattctagttggtcctgaggtctatgtggaaattgttaagatgtacagagaatatcatgacctatgtcagagttgtgactcttccaacagaaaataacacgtgtcagtagaagatcatgagaatttcatcagacacaactaactccatgctggtgagacagggattactgaaacagcactcctgggattaggattgactgtggacctggataggtttcacccacaggtgtatttcattaatcactttaactggaaggagggtctagatactatctatagctattcactcattgtggctttgttgctttctttagtgtaagaaaatgtgtaagaaaacgtgggggaaaaggtgggaagattaggaattgagtcagtaggcgtaaaatcatacaaccagctaatgatagaagtgagactaagacgaaagtctctagacttccaagtttcatacttcttctgctctattccacttttactttgaagaggggttgccattgtctggacaaaaatcctaactctcctttatgtctctaaaatacttttgggggcttagagtgtgaaagttctgcaatgataataataggagcacaccgtcttgagaacttattatgtgccacgcacttccaatgtatgatatcatttaattctctaaacaactctgggtagtgggcactattaatattttcattttctagatgaaaaacaaaaaggtttggaggagaattagatgtcacacctgagaagtcgtaaatccaaggttcaaatctagcttgactgagtacagagtcaaagattataactaggaaactatagactatgggtttgttagaaaccatttgcccttatgtagcagaaatggtgttttatttagatctttttggtattttcatattaatcatgtatcaatatgtcatttgacctctactatctaaaggacatgctgattttccccaaatgataaataaaacaataacaaaagtagtttattctccctcctgctcacagatagaattccaaaaacacatacttctcagaagcaaaatgaggcattattccctgaaagaatgaacaattcagtatcctacattttccagaaacaatctcccaatcaaaaaaaaaaaaaagtgactgacagcttaaggagaaagagaggttgagagacatatctcaaaattacccattacccaagtgcgttaatagtaatagtaagacatcaaatgtatagttggtctctttacctccccagtttagggagtttcaatgatccctggaggcacatgaacctactgtgctaagtaatagtctcaaaattcagagactccctttcacagcccatcttcactactgactcactgcattatttgctaaaaccaagttgttcactcactgagatggattaagagaaataacattcctaatttttaaagctgtgagaagacaaccatgctatctgggcaaaacagacaaaaaatgctttacagacataagcagtttagttttgtaacgaaataaaacttgcaacaacaaatcatctgacacatagctaatggtatgcttcgtcattatttgtctgtgctgtaatttgacctaaattgtgagcagtttgtgtaaatcgctttatttcttagtgatgactatctcttaacatttgtataacactttaaagtttataatgtactttaccatagattatcttattatctcacgtgagaaggtctaatgagctcagtaaatgttagtgtaatttaaatcactcaaagccacgttagaaaggctaggtagatatcactaattccttctttgaatgaggaagctgagacatacagcttctttgtgactgggccaaactaaagccaaagtcatttgacatctggtgatgactgttctttcttataccatgtcacctttcacatagtcagatatagcaaacagtgccttgtggagaggaagaatgggtaaaattaaatttaaaaagagcgtttgagatgtccctctgtggtttagtttcctttgtatgcttcaagtggtttatccttcaattccttaaggcagatctctttttttgtgttgtttgagatttcaaagagagagagagaaagagagatacaaacatgtacctctcagaagactactgctagctgttaatagtaaaaacagagcatttcctttttgtagagtgctttgtaaatctcagagcttttctcttaggtgaatggcaaaagttcaaagatctttgctgtcacaggacactattcattatctggttcttccccacctccctggtatcaacccccttgctcctccagacatactctgtcctagctacacaaaacaaaacttatagtatgttcttgaaagtattaagctatcttatacttccataatctcacacatactgtcctgtttgccttggctgcctctcctctgctttatccaaagtttccaaggcttccattcttcttcttcatcctcaattattatagtaccctggagatggttttaagaaacactgtccctagattccatcctaggccagttgtatctgacatctatatttataaaaactttcctatttgattctggtgcctgtgagggttgagtatcattattcacatctctatcccactgatccttcaactcctcaaggggatggagtatgttattcaattttgtattcccagaacctagcacggagtcagactcatttattagactttctttgtctcagaaacagggctatttggacatgccaaaggatgctggagtttcacattcttctcttttttttcaatgctatttgtagtcatttattaaaaaatgaggcagctttatatgaacccatagacatgaaacattccttgcctctgttatctgtgtccaccagaatgccatgttacacattatccaaaatttagtgtcttaacacaataaatatgtatttatcttaatcatctgtaggttgatgatttaggctgtgcagttctcattttagctgggcttgcttgcatatcagtggatcagctggatgttggccaaagtgatcagaggggaatcattttcccttctatcaccaaatgtgccatcatacctgcattggtgcccatacattgtgccttctcttgggtcacagcaggtgtgttgtcctggttcctgcctaaagatcaccgctctatgaggttatctatttaatgacttgaatctgtaattgtcccctctcttgcatcatctatttacccttctttgatatcattcctttgaaaacatgctgcattgttttacatctaaacaaaatacattccttttaacccactgacccatatctctttcagcaaaatttcagagttatctataccaactttcttcacttcctcacctgccattctttcttgaaccccttatgtcaagttgttgttcccacagatccactgatgctgcttttgccagtgtcctcagtgatttccatgttgccacatcaaatgtttccttctttgccctcatattattcagcttcttggaagcagttggcatagttgattactccatcctccttgaaattctttcttcacttggcttcagggaaaccaccctccttgttttccacctatctcactggtaactactacacatctttgtgggctgaaccttctttatcttactgacccttaaatgttgaagtgttctcaggctcagtcctcaaatttcttctcttttcaattttttctagcttttattataggttcaggggtaaatgtgcagattggtatataagtaaactgtgtgtcacaggggtttggtgtgcccaggtaataagcatagtacataatagttagttttcctgtcttctccctcctcctaccttccatgctcaggtaggtcctggtatctgttgttccttctttgtgttcatgtgtactcaatgatttgctgcctctcataagtgagaacatgcagtatttggttttctgttcctgcgttagtttgcttagaataatggcctctagctccgtgcatattgttacaaaggacatgctttcattcttttttatggctgtgtaatattccatagtatatacataccacattttctttatccagtctactgttgatgggcatgtagattgattccatgtctttgctactgggaatagtatggccatggacacacacgtgcatgcatccttatggtagaaggatttatattattttgagtgcatacctgataatgggattgtttggttgaatggtaattctgctttggattctttgagaaatcaccccagtgctttccacaacagatgaactaatttacattcccaccagaagcgtataagcattctcttttgtctgtaatcatggcagcatctgttattttttgactttttaataatgcccattctgactggtgaaatggtatttcaatgtgggtttgaatttcatgtctctaatgattactgatgttgaacattctttcacatgcttgttgccacatgtatgtcttcttttaaaaagtgtctgttaatgtcctttgcccactttttaatggtttgggtttttttttttttggtgttaatttgattacactccttataaattctgcatattagacctttttcagatgcatagtttgcaaatattttctcccattctgtaggttgtctgtttattctgttgtcagtttgttttgctgtgcagaagctatttagtttaactaggtcttatttgtcaatttttgtgttgtaattgcttttggtgtctttgtcataaaatcttttccaggtcctaccttcagaatggtatttcctaggttatcttccagagtctttatatttttagcctttatatttaagtctttaatccatctgaagttgatttttgtatatggtataaggaaggggtccagtctccatcttctgcacatggttagtcagtcattccagcaccatttattgaataacaattccattcaccattgcttgttttttccaactttattgaagatcagatggttgtaagtgtgtgacattattgaaacaggaataaattgaatccctgagcagaccattaagagctgtaaaattgaatcagtaataaaaagcctacctgcacaccttgcacatgtacttcagaactaaaatatacaatacaatgcaatacaatgcctaccaaacagaaaaatcccaggaccagatagattcacagctgaattctaccagatatataaataagaactggtattattccttctgaaactattccaaaaaagctaagaaggagagattcattcctaactcattcaatgaggccagcatcatcctgataccaaaacctgatagaaacaaaacaacaacaacaacaaaaatcttcaggccaattgttgatgagcatcagtgcaaaaatcctcaacaaatactagcaaacaaaatccagcagcacataaaaaagacaattcaccacaatcaagtaggctttatccctaggatgcaagtttggttcaacatatgcaaatcaataaatgtgattcatcacataaacagaactaaaaagaaaacctacacgatcatcttgatagatgcagaaaaggctttcgataaaattcaacattccttcatgctaaaaaccctcaacaaactaggcactgaaagaacattcttcaaaataagagacatctatgacaaacccatagacaacatcatactgaatgggcaaaagctggaagtattatttttgaaaactggaacaggacaaggatgccccctgtcaccactcctattcaacatagtactggaagtcctagtcagagcaatcaggcaagagaaagaaataaaaggtgtctaaataggaagaaaggaagtcaaactctctttgtttatagaaaacatgattctatacctagaaaaccctgtagtctctgccccaaggctcttagatctgataaacatcttcagcaaaatttcaggatacaaaatcaatgtatgaaaatcagtagcatttctatacaccaatgacatccaagctgagggccaaatcaagaatgtaattgcatttacaatagtcacaaaaagaaaaaagatagctaagaatatagctaatctgggatgggaaagatctctacaactagaattaaaaaacactgctcaaagaaatctgagataacacaaatgaaaggaattctatgctcatggataggaagaatcaatattgttaaaatggccatactgcccaaagcaacctacaaattcaattctacgactatcaaacaatgacagtcttcacagaattagaaaaaaataaaattcatatggaactaaaaaaaagcccagatagccaaggcaatcccaagcaaaaagaacaatactggagacatatgttacctgactttaaactacactacaagagtatagtaaccagaacagcatggctctgctacaaaaatcacactcttttaaaccaagactcctcagtactactggatcttcatgtagagctataatatgtgtcagtgctccacatcgttcaatgttggatgatattttctgtttcacctatgctgatctgattcgcttcagtctcttattcaggttttctaaaatgtagtatttccattttggtctgccctctgtctaggccacatcacccttctacacaactgctatctgtaactgatgatggctccatttttcacttagcctgaacatagcctcagaattcttctcaacccagaaatccaagaagccatttcaagtaagttagagtaggtatatgaatcaaaatctatttgtgatccctgacctgaatccttgaattgatgacataaatttgtgtttggctcttttggctggtcaatttcctcggctatagaacttccaatattacccggctttcacactacatttatataaatgaaacacaactacctggttccccatttcaagccttggttcagctttcaacaaggaaaaggaaatgagtgttgattgcatttcatgagggcatcctatactccaatgccacatttgaagcttatagaaataggcttgagtaggaaatgaaatccaattatatgtattctcatttcactgatattcacaggtatcattgtcctgttcagattaaggcactatggtcgggtgactatctcaggcctatacctagatatctttgggctatgaaaacggttgggcttgatcttacagttcagcatcaccataatgcaaagaggccctgtgtagatggctgactcaaaggcatgcaagacaagtaaagcagaactatattcaaactgtggcttggaggtgagcccagtgacacccattaccttctaatttttaatatgctattgtagtaatgtgaatttgggtaagcgaactcagatctttgtaccccttgttcccagtttgtagaatgaagctattgagccagaggattctaaagtccattctggccccaaaactgattgtgaaacatttgtggaatgacaagaaggcagagactaatgtttctgtcatataagtgagtgatctggggctttttgatttcaaagatattgacaagaattattcagctaataagtggtgaggtcaggattaaaccgagaacttctgaccagaataccacaaaatgttttaccagaccacatggattctagttaaattttagttttcaggttagaaaagaaaggtgagtaaatttatcaatcttagaaaatctggagaataatgtagtaggagaattgattgaaagttcattttaaaatccctgaaaagctttagggcaacctggaagagggccaagttcagtggtgacttcaaacacaatatactacttttgcccgtttttaacatttatataaatagaatatagtttatttaacttaatgttacatttatgagtttcaactatgttgttttttgttgcaaatttcattctcattttgtataaatcctattgtataaatataattaattgctttgtggatgacatatatttgtctttctttcaattatttggcttttaataatggtgctgagatatacatttttatgcatgtattttggttaattcatacatttctgttgaatatagtcctagatttttgttgagcttttagtgcattctgacatatccaatttttcagagtcattctaaatattgacataactactccagtttcagttaaaccacatccttgctgacatgtagtattgttagactatttaattcttaattttaaaacactacaaataagctttattttcatattctaggaaatgaagatgctctagcatattttatttagaagctgtattattttaactgtctcatttttctctccagtcgatctggaggagtaagggtaaatatttatttgatgcacatacaattgacccatctttgtattgaagagactatcatattgccacagtgctgcactgttatttttgtcatatattggtacacttttataggcctatttctggactctctcttttgctacatgatatgttttggcgtgtccccacccaaaactcaacttgtattgtaactcccacaattcctgtgtgtcgtgggaggaacctggtgggaagtaattgaatcatgaggtcaggtctttcccatcctgttctcatgctagtggataagtctcacgagatctgatggtttcaaaaatggaagtctccctgcacaagctctctttttttgcctgctgccatccatgtaagacatgacttgccccttcttgccttctgctatgattgtgaggctttcacagccacatggaactgtaagtctaattaaacctctttttttggtaaactgcccagtctcaggtatgtctttatcagaagtgtgaaaatggactaatacgctacatttgtctgtttgcctttgtactatctgaaatactgtagcattatgaaaattcaatatccaatagagtaagtcctccagttttagtcctttctatgtttgcatatatcttattatccacttatttatttccaccataaaaactgagtttgggattgcattaaatatataaatctatgaagtaaaaattaaaatctttacaagagttataattgaagagcatggcaaatcacaattaagttaggtcttctttaatttctcttaatcatgcatgtttttagtgttctacataagtcttgcacataattcacagatttattcctagatttttgatactattatacatataataatatgtatctttaaaatactcatgttctatatttgttgttagtatttaaaaatacagttgatttttaaaaatattgcccttttgtccaaacacctcatcaaatgtacttttatttgtaatagttttactctgtacattcttttgaattttctatgtatataataatatcatctgtgaataggacagttttatttcatcaggtccttttaaataatatttactagaagtgaatgtaaacaagcattttatctcctcacaatttcagaaggaaagtgatctttatttcaccattcagaatgaagtttgttttttttatattttgttaataacatgcttctattctcagttttagagagtgcatcatgaatgattgttggttttattaaatgactttttctgtgtctattgagattattatatgtttttcttccttagttgttcatatggtgagttgcttgattttgaatcttaaaaagcaataaagttaacttagtcatagtatattacttctcctatgttatgatatcactgtatttgatttttctcttcttcctcccttctgtcttctttccttttctcttccttctttcagaagtttggcacataatttcattagagaagaagtctatacttttcatttaacgtccttatcttttgttatcaggattaggcagacttcataagaaaagttggtgtgtgaaaatatcaatgtattttttaagatacattgaatcataaggcatattcaatgtgtaaaagtattacaatatattaataaaagcagaggtattttaaagaacattagaggcatactttttaaagggtcatggcatttgctcagggagtatacaatgaagttagtctgtaatctgagaagggctacctggaatccaggtatgttcagcatggaggctccatcttcccttttctttgtcaccatgtgtacagtaaagaaacaggcaacatggcactggccaggtagagaacccatctgcataatcaaatgttagggtgcggtggccaaattctttggatgctatgcaaatggcacacctggttagaccaatcttttgtgccctaggtaaatctgatatcaccccctcaagctcatctacaaaaccttctgcatttcactgtggaagcagtgacccgttttctccaggacccttctctgctcagagagctctttctttctttctcctattaaacttctgctcttaacctccctctggtgtgtctgtgtcctagttttccatggctgtgagacaatgaacctcgcgtattaccccagacagtgacgccgcttcaatagtgagtaagttcttgtgagatctggttgtttaaaagtgtatagcatcccctctctcactctcttgctcctgccatgggagatgctcgctccccctttgccttctgccatgattggaagcttcccgaggttctcctcagaaacagaagcagctgtgcttcctttacagcctgcagaactgtgagtcaattaaacttttctttataaattacccagtctcaggtagttctttatagcaatgtgagaacagactaaaaaaagcaaccggctattgttttcaaggggtgttgccatattgagtgcacagtgtcattctgtactgtaggcagttggggcttgaacagcagctgtgacattgttggaaaagaggtgacgctcttggtcctgtgcataccattcatcctcatgttaagttggctcatgaggccattatgtgagccctgaggtggttaagatgaaagactggctgatacccatgggacatgtcatcatgtccaactggctgttgagaaattcctgagttcgtttaggtgattaatatgaaacacaaaattttgcatgctgtgtgcctactccaaaattctcactcacatacttcttctaaaggctttctcatccttcatttttcagtattattactcctggaacactagtaggctagttgccttttcccaaaagtcattgcacattctaacctcagaccaagctccctccaaatgaagtgggtagtcaactgtgttgctcatacccctgactacaagaaggatttcccaatgctacaatcctcactaaatggggctgtattgtagaagatgtcaattcccagtaattgataagcattacttcaatacatttttgaatgatgcccaagtcagcatgcatcagctggccatagggaatccccattctatggtgcaattggtgtgctttaagcaagaagtaccagtgcatcagaggtagatgccatagactgcctatttctgtaatttaattatatcatcagtatatactcaagcctgatcctgaatgtatgacttctcttacataatgtatttttgctgtgcccacaaatattatctgataaaatggatcagataatggcttctcaggccatgtattcatttggcattccatattcaaatactcagtctcagttagattcaagtagcatgccaaggttattttttcaaaccaaaagtaatctcgtgatgtggagggcataattttactccagaaaccaagagatctgtactctattatcgtctattggggtttgacaagataaggatccttacgtgtcactctagcacagtatttctcaactgggggctattttatctcccaggaggaagttgtagctatctggagatgtttttggttgtcataatttgaatagggattgctactggcatccagtgggtagaaaccagagaagctgctaaacatcctaccatacactggatacttctttctccacaacaacaaaaaataatcaagctcaaaatgtgaatagtactgaggttgagaaactggtctagcactattgaatctaatgcgttctatgatttgaggttggacagattatactgtatcctagacatgctgcaaatatttcctttgttcttgaccacacttgaaacttgaaggattcttcattcaatacatggattggagcagttttctaagtatgatgaatgcggtctccaaaatcccctgtcctccttcaaaaagctcataacatgctgtgagagatgtgaagtgtaacagttgcattgacctcagagggaatatctctgtatcttctggaccatatatgacgcttgaaaactttaccacattcattctctactgattgggttaaattctcattctgtgaagaacttcaagatgattaaggttcccatagaactactttatgacaaagagaagaaaattacactgccttgggccaagagagtaaaaggcagtagaagtgtattgttgtctttattgtgtaatggtgaacaatttttgagtcttcctgatgatggtgaacaagaaaaaccatcatttacaaagtcactataaattatgcaacataaattgtgttaatctattacagtaaagactaggccacattttgaacagcatctgaaattggaaccaacacttggttatgtttatagtatttcactatcatttgctacaactcatctgcttttttgcagagactagagagatgaattgaatatgggtatagtaagtctcttgtatttgttaaattttagtgatcctaatcttcagtttttcctgaattgctctgtttcctttattttcttggcacaggagaaatagggcatgttgagggctttccacttgactcttttatgatggcccttactccacaaatcagaaaagcgacataagttcctgccaggtgttacgtatatcaatcctaattttacatgtaagaaacctgaagataactacaaggtgggttcacatgaattggacataatatgagagattgggttcaaaattccatgctacatgcagggtcaagaattaggtgaggcaagcaaaacacttagggaacaaaatctgaggagaaaattattctcagggctgtgcaagtacaaaccctgcacttgcataacaatgagagtgagtgctttcttaacatttgtttcctatgcatctcattcaccttaccctggtctcagtcctaatcacctgacctttctaagtcccactgtaaacctaggaggttatatctcacagtatctcatagtttaaaacatctctaatgcacaatcacctgggaaactgaagaatttgagaaaaggaatacttattgcatatacttatggtccttttcaaaagcaaccatcctccactttgatcaatgggttctggcttcatgaactgacttcaatctaaaatcaagaaaccctacattttttgtattgtcacagctgatctaagtcttttgcttccgcttcctcttcctctccctctgcctctccctatacatagtgattagtaccctccttggctgcccctagatctcggttctataagcaccataaattaggtattttctgcagtttcaggatatgagtcttctttaaatctgacatagagactctagctttgaaagcatgccttaaattgcaattgactgctagaatctacattctccagtttcgttctcctgttctatactgctgtaaaaataagacgtcttcctcctaaattcttataattgtcattgcccttatactgactaaatatcttagctacttgatcccccaatgcctgctgtcccagactaatttaggatcaagaagtaaaatagtcatcatggggatatatattgacaagtttatctgaattaaaaattaagtaattaaaaaagttaaaagtagatacataatgacattctttctcacataaaatatgtcttatttgcctaattgcttttgctaattaatttatatgcaggcatttcccatgaaccaaatgttcagctccaacattttccaaaatatatttcaagcacaagaaaacataaaagctcttaatccaaaatgtaatattttaaaaatgcattaaaattaacattattttattttttcccaataatctaagtctatcaaattaagccagatgtctttaaattaaaagtttccagaaaaaacataatagacatgtattagtctcggtatatttttttgatacacatctcagatgtgtattgttgttgtattgtgttgtggttctttgtttcttataaaattcaagtaggacccaacttcatgaccagggtgaggtaaacgagacactttgagagaaaatcttaagaaggcattcagtttcagagccatgcaagtgcccaccctgctcttgcatgaccccaaaagagtgcctccttgcttgtctcccccagccctgaccacagtatgacacaattaaaatgttaactgatagatcattaaagacaccttttgatcttatatcagtttgtaatttttgttgtgtaactcagaagaggttcaaaggaatgactaccattgctcaatttctatctttaggaatagacttcttctggcatatatgtatatccattttatgctgactttccatatgtgtgtgtgtgtgtgtgtgtgtgtgtgtgtgtgtgtgtgtacttcatataaattgagttatatattatatatataatttatgtatataaattgaaaagtaggcataaaatgaatgctcaatcctttcttattctagtaataaatcataatcatccaaagaaaaagacatacttttatgtaattgtttgtattagtttcttatagctgctgtaacaaattactgcaagcttctttgcttaaaacagcagaaactcaacatcttacagttctgcaggttaggggtctatatgagtcttacaaggctaaaatccaggtatctgcaaggctgtgttccttctgaatgccccagaggtgaatccctttccttgccttttccagctcccagaggtcacctgcattccttggctcatctcagtcttcaaagtgcatcattccaatacctgctgtgtcatcacagcttctttttctgcctctgaccctttcgtctcctcttataaggactcttgtgattatgttggatcctcccagataatccaggatcatcactccatctcaagatctttaatttaattgcatctgaaaagtccttttaccatgtaaagtaacataattacagattatggggattagaacatgaacatttgtgaatgggttattatgctgtctaccataacccccttccacctcattggaatgaattttaaataaaattttaatatttatattaaaaattctttattaatgttaatatttttatgaaatcaattttttactaataaatgttcatgttttaatccaagggcatggatttaacatgatttctatgattatagaaaattcaaaaaatatattgtgcagctatatgttttcattataaaatgtatgatcaaatgacaatataacaatattttgtatagaaaaatgtactacagaaaggcaaaattcatttagaaagtgaaagaagtatatgtattcaaaaggaaatgaaatgatgcaattttctaaatgttacagaagacctatttcatgtgatatataaacagataaagacatgtgtcagagaatcaggatttaaatttctttggctatattaaaaacacaaagaaactattatttaaaaaagtaaatatttacaatatgctaggaattatgtaatttatagttatttgatcttatgatagaaatgtttggtcataatataaaactgtatgataggttacatagctttcaaaattattttgtaagataaatgagcaaaaattagtaacctccagctgtaggctgtaattgtcatagtgaaatattgttccaggtttggagagtgcccatcagtaccagaaattgctgcaaacagaatttgatgcataatcagtatgtaacctattttcagtcccagtctatctgcctgagtcttcatttataaatggtagtaatagcaccacctttgttctcagggttgttgtcaataacaaatgagacactttgtctaatttttttcataaacatatagtataagctgcagttattaatgttgcttaattttatgacagcaataaccagtaacagggcttttccttcaccctgtgttttggagacaaatctgttatgaacctgcttatgaggagatcaaaagatcaagtaggaaatcctgacaaatgctcttcttctcactcattaaattgcccctaaggggagacttcaaagggaatgactagtgactgtttactgactggcaatagttcaggtctttggagatttttcttttacacaaaatctttcaaaggggacttttaaaggttacattgaaatatgtcattcctactcctcaatcttcatgcctctgacctcagaaggacactaataatagctttgtgaaggggaatttgctactcactagagatattggcaataattacttggtgggaaaagctaatgattttctcacttacaggaagactggtgcttccactagttgttgttcctttggtaaattgaaaggcttttcttatgataatgtggagaatgaatgaacagcacattaaggagctttctgaatagggaaatgtactgacatttcagcattatctgaattatgtgttaagagtagcttagtcaaattaaaatgaatggcaggtcaaagcaaaaatcacaagctctttcttattactcagaatatatattaagtgttctctaattctaagagtccaaaatatattagacaatttagtttacagggacaggttagtttacagggacaagttatcattatggggtttgggtaggagacctggagaaatttgaagttctaactctccattctaaccaagctttgacaagccaactcttacccttcactttgctactttatagccttcccatgttttggttaactttttacatagtacagctttatagtggaaatggcttaaactggagtttctgagaatctaatcccctttctacctttaatttactccttgacatgtggtaaatcaccttatttctctgcttctcatttataaatttctgacggttgtgttagatcaattctttttttaacaagctacacaaataatgatcatggtgttacagaaaccactcccttgggctgggcttgagactcggaaaagccccagctttcctgattttataagaaggaaacctcttttatgaacagaacactaactttactattttcacactaactttactatttgcttttccactccagaaagctattaattggtgacatggagattattataaggctaaccttgaatgtgctttaattaatttaaaaaatatatgttttgattatgaaatggtagatgaaggtgatagacatccaatgaggagaataatgaccacagagagaatgtgaccttccaaatgacatagcatctttgcaaatcatcttgtgaaaaaaaaaatcctcaaagtcaaaggaagctgggaagttcttctagatggctaagggtttgttgagctgacactggatgagttagaagatgaaagaagctaaaactgaaccttagaaaggaaagagtaatgtgaaaacctctggcccatcttcagaaaacttgcaacatatacaacctcttttgaaaacagaaagtcacaggccaatagctatataaattccacattaaaagaaggctatgcagatgaaagtctgattgccaaatggaacagagaaggttatgcggacctgtgctgcctatgatatattcaaggtgccaactctggaacccacttcatttgctgggcttgaagctgcatgagggagtgatcatcaagggtcttcagtgtggctgcaggggtagctctggctgaggctgctctgagcccaattcccatcctgccccagaccttggactttaatgatggctgctttttcacttgcacctgccaccccatttcctggtaggttcttctctgtatagcaggaacctaagtcagagttaaagcatagtctctatagttgatggctttggttttcatcaagtgcaattatttgtaattttaaaaaataaatcccttaaacctcaaaaaaagtaatttggatacacttgtactttgcttgtaatatgtcctctagagtaagacatgtttccgaactcattctaagaactatactgttggcttcaacttttaccaacagtctcacctaaacttatttcttttcctattatgtctgaggaaaaggttaacatctacttgtcagacaagtagcagtttacaacaactccggaggaggaaaaaaaatgccttaaattgtcagttccaagaacctcattggactatactttttcaaaggatggagtcttaggaagaatgtaaataagtctgtatcttcttttgcccaagagctttctaaagaaaactcagctttagggttttgtttctcttgtgtctctttccttctttggcagaaatccttggataaagattctgacatccttttctctttctcttgtgctcttctttgttccctctggattttccccacaaagcctggagcccagaagctttggaagctgccccttctattacaaagttgtgtggcataaagcctatatcatctctgctctaggcatttgtaaactctcttatattattttgcttgtctcttctccctggctacaggttctgcttggaccactttttcctttcatcagaattttatgacagagcggcttagaattcaggcatgagtttatagagacagaaacaaagggggttcaatctgtttggcttcaaggtttcaggctcatctttagccaagcaaaaaatattacataaggacaagtccagccaaacaggctgctgtgctgagcttttgaatcaaagcctcatagtaatcaaatgacagcacttacctgtgttttacccaagtcacatctttgcccttgctgtgattctagttgtcaagttagataataaataacttgaacatgattttagactatcgtgaacgaactagtagaggaagagaggatacaaaatcagaaaatagagggaatgataatgaagccaggtccctttatttttcttgtccattaattttccttgaggtgtaatgaagagagttagtgttaagtgaacagccaagaacataattgggagattcagaattcagtgctcaagtctttccctaagcacattttattcccaacgctgcgtgatatcaattctacttttgctccaggtttaattccatcccacaaagaggaactcagtttcatcaatatttcccatattttctgattcttcattctcttgtcctccactaacttcttcccttcatcctataaacatgttcaaattactcattatcttaaaatggcaatgacaaggataaagatgtgagttcagtaatactggaacatgtattcggctaaagcgactcgtggacatgacagttcaggctgcatggcaacttgggaaatcaacagaaagaagtgaggaataagtcatggatattcagaaaactgaatgtgtgaattaatggcatgcatttgaatcttctttgtaagcagagccaagtgcatgctgttcatagtggttttggaattttggtatccaaaactacagagtcaggatgggcccaaactccagagagctatgggtgctcttgatgatgaggtttagttatgtgggggcttggtaggagcagaaaccacagttattctgcagtgggaaggtgttgaggagcttatggaatatgaagtgatcatttaggaggtggcagcacttgaagtattctacgaattctctgtgtaaactctgaagtaggagagggaaaccaaagcttaggggactttaaataggctcatctaaaagtaggacccagctaggagccccagtccaagatcaaaatgttagggccagctctgaaagtagaatatctcctagaatatggctataaatctttttctgaaggagaaatatggcaaggtaactagattagccttatttaacacaactgtactaaaacaactatttacctcacagaattttgaatcagtatactaaagggtgagacttgaacataatatgtgcattgttttaatttttttttaaattatattacttgacttcaaattttacaaggctatagtaacctaaacagcatagtattggcataaaaatacacacacaaatgaatggaatagtatagagaacctggaaataaagccacatacctaaagtcaactgaccttcaacaaagttgacaaagacaaaaacatatactgggggaacagacaccctataaatagtgctagggaaattggatagtcatatgcagaagaataaaactgggtccctatcactcaccatatataagtactaactcatgatggattaaagacttaaatataagactggaaactattaaaaaatactagaatacatgctttgaaatgtgattcatcacataaacagaactaaagataaaaaaaatgattacctcaatagattcagaaaaggcttttgataaaattcaacatccctacatgttaaaaactctcaataaactaggtattgaaagaacatacctcaaaatagtaagagccaacaatgacaaacttacagccaacaccatactgaatggacaaaagctggaagcattccccttaaaaactggcacaagacaagtatgccctctctcactacttctattcaacataatattggaagtcctggccagagcaatcaagcaagagaaagaaataaaaggcatcccaataagaagagaggaagtcaaactatccctgtttgtagacaacatgcttcaatatctagaaaacctcatagtcttggaccaaacactctttcagctgataaacaacttcagtaaagattcaggacaaaaaattgatctactaaaattattagcatttttatacgccaacaacagccaacctgagagccaaatcaggaacacaatcccattcacaattgccataaaaagaataaaatacctagaaatagagctaatcaaggaggtgaaaaatcactataatgagaattacgaaacattgatcaaggaaataagagatcacagaaacaaattacagaaatagattacagaaacatgaaaaacattccatgcttatggataggtagattcaatatcattaaaataaccacattgcccaaagcaacttgcagattcaatgctatgcctatcaaactaccaatgacattcttcacagaactagaactactttaaaattcatatagaaccaaaaaagaacccaaataagcaaggcaatcctaagcaaaaagaacaaagctgagggcatcacattacctgacttcaaactgtactgtggggctacagtaaccaaaacagcatggtcctggtacaaaaacagatacatagaccaatggaatagaatagacagcccagaaataaggtcatatacctacaaccatctgatctttgacaaagatgacaaaaacaagcaatgggaaaaggactccctattcaataaatggtgcagggataactggttagccatatgaaaaaaattcaaactgaaccccttccttacaccaatacaaaaatcaagtcaatatggattaaagacttcaatgtaaaaccccaaactttaaaaaccctggaagatgacccaggcaataccattctggatataagaacaggaaaaaacttcatgatgaagaggctgaaagcaatcgcaacaaaagcaaaaactgacaagtgggatcgaattaaactaaagagcttctgtacagcaaaagaaactatcaacaagagtatacagacaacctacagaacaggagaaagtatttgcaaactatgcatctgacgaaagcctaatatccaacatctataaataacttaagcaaatttacaaaaaaaaaaaactccattaaaagttgggcataggacgtgaacagacacttttccagagaaggcattcatgtggccaagaaacatgaagaaaagctcaatatcactgatcattagagaaatggaaatcaaaaccactatgagataccatcttacatcaatcagggtagctactattgaaaagtcaagaaataaccgatgctgctgaggttgtgggaaaatgggaacacttgcacactgtttatgggagtataaattagttcaatcattgtggaaagcagtgtggcaattcctcaaagacctaaaacaaacaaacaaacaaaagcaatcccattactgggtatatacccaaagaaatataaattgttctacaataaagacacatgcgtgtgaatgttcattgcagcactattcacaatagcaaagacatgaaatcaaactatatgcctatcaatgatagactagataaagaaaatgtggtacatatacatcacggaatactatgcagccataaaaaagaatgagatcatgtcttttgcagggacatggatggagcaggaggccattatccttagcaaactaacccagaaacagaaaatcaaatacttcatgttctcacttgtaactgggagctaaatgatgagaactcatgggcaccaagaagggaaaaacacatatgggggcctacctgaggatagagggtggaaggagagaaaggattaggaaaaataactaatagatactaggcttagtacctgggtgatgaaatcgtctgtacaacaattccccacaaaatgaatttgccttaactatggggtactaagcttagtacctgggtgatgaaataatctgtacaacaaaaccccacaacatgagtttgcctatataacaaacctgcacatgtacccctgaacctaaagtaacagtttaaatttaaaaaaaagattctcaattaatagcctacgaaccaaaaaaaagtccaggaccagacaaattcacagccaaattctaccagaggtacaaagaggagctggtaccattccttctgaaactattccaatcaaaagaaaaagagggaattctccctaactcattttatgaggccagcatcatcctgatagcaaagcctggcagagacacaacaaaaaaagagaatttcagaccaatatccctgatgaacactgatgcaaaaatcctcattaaaatactggcaaaccaaatccagcagcacatcaaaaagcttatccaccaagatcaagttggcttcatccctgggatgcaaggctggttcaacatacgcaaatcaataaatgtaatccatcacataaacagaaccaatgacaaaaaccacatgattatctcatagatgcagaaaaagcctttgacaaaattcaacagcccttcatgctaaaaactctcaataagttaggtattgatggaacatatctcaaaataacaagagctatttatgacaaactcacagccaatatcatactgaatgggcaaaaactggaagcattccctttgaaaactggcacaagacagggatgccctgtctcaccactcctattcaacatagtgttgtaagttctggccagggcaatcaggcaagagaaagaaacaaagggtattcaattaggaaaagaggaagtcaaattgtccctgtttgcagatgacatgattgtatcctttagaaaaccccatcgtctcagcctgaaatctccttaagctgataagcaactttagcaaagtctcaggatacaaaatcaatgtgcaaaaatcacaagcattcctatataccaataacagacagagagccaaatcatgagagaactcccattcacaattgctacaaagagaatagaatacctaggaatccaacttacaagggatgtgaaggacctcttcaaggagaactacaaaccactgctcaatggaataaaagaggacacaaacaaatggaagaacattccatgctcgtggataggaagaatcaatatcgtgaaaatggccatactgcccaaggtaatttatagattcaatgccatccccatcaagctaccaatgactttcttcacagaattggaaaaaactactttaaagttcatatggaaccaaaaaagagcctgcattgccaagacaatcctaagcaaaaagaacaaagctggaggcatcacgctacctgacttcaaactatactacaaggctatagtaaccaaaacatcatggtagtggtaccaaagcagatatatagaccaatggaacagaacagaggcctcagaaataacacaacacatttacaactatctgatatttgacaaacctgacaaaaacaagaaatggggaaaggaatccctatttaataaatggtgctgggaaaactggctagccatgtatagaaagctgaaactgaatcccttccttacaccttatacaaaaatcaattcaagatggattaaagacttaaacgttagacctaaaaccataaaaaccctagaagaaaacctaggcaataccattcaggacataggcatgggcaaggacttcatgactaaaacacaaaaagcaatggccacaaaagccaaaattgacaaatgggatctaattaaactaaagagtttctgcacagcaaaagaaactaccatcagagtgaacaggcaacctacagaatgggagaaaatttttgcaatctacccatctgacaaagggctaatatccagaatgtacaaagaacttacatttacaagaaaaaaatctaacaaccccatcaaaatgtgaacaaaggatatgaacagacacttctcaaaagaagacatttatgcagccaacagacacatgaaaatatgctcatcatcactggtcagagaaatgcaaatcaaaaccacaatgagataccatctcacaccagttagaatggcgatcattaaaaagccaggaaacaacagatactagagaggatgtggagaaataggaatgcttttacactgttggtgtaaatggttcaatcattgtggaagacagcatggctattcctcaaggatctagaactagaaataccatttgacccagccatcccattactgggtatatacccaaaggattatatatcatgctactataaagacacatgcacacgtatgtttattgtggcactactcacaatagcaaagacttggaaccaacccaaatgtccatcaatgatagactggattaagaaaatgtggcacatatacaccatggaatactatgcagccataagaaacgatgagttcatgtcctttgtaggggcatggatgcacctggaaaccatcattctgagcaaactatcacaaggacagaaaaccaaacaccgcatgttctcactcataggtgggaagtgaacaatgagaaaacttggacacagggtggggaacatcacacaccggggcctggcgtggggtggggggatgggggagggatagcattaggagaaatacctaatgtaaatgacgagttaatgggtgcagcaaaccaacatggcacatgtatacctacgtaacaaatctgcacattgtgcacatgtaccctagaacttaaagtataattaaaaaaaaaaaaaaaaagaaagattcacctgaagatcttcatttgtgtctggcttgaattctgtttggcgattgtgagcaccctgcagtatcttcaaaggaaagaaggaagtttgagtccgaagtttatagtttgcatacccccttggatgaatggaattcagtcatgttgccagaaagtactgagtttaatctaaaatatttgtctcacatagctatttagtaaggaggtaaatcgagacaaatcaaaacaacaactagaagaacaaagacaatgaaatgggagggacttcaacgtttctgcttgaacaatgacatggcagagaaggtgaaatatttggttttggatcttgcttgagaaaatacaataagaataataaccctgtaaatactctgccttgcagacgcttgggagttcagtcagagagttctcaaagttcttccagatacccacaaacaaaggtattggcctactgcagacaccaaagccttgtcatttctacatgtgacagcaggatggcaagtttggtgggtggaggtgctttcaaggcagtgggatttcagaacctactggtgactggtcttttgagaattagggtgcttttggcagagtagttaaaaacaacaactcaaagccctggaaaagacagggtttattacatttggcattggtttagctttccagtggatgcccgtcttctgttcttctgtgtctgggatattaaatactatcagagaaaaatccttctgctagcctgattgatgcctttacaaatgcatggattttaaagttggttagaccccttgacaatctgttaattcatctctaattgtctttcatttctctttctcacaacactctatcagaataatttcccctatgaaattcaatgtgttttgaaaacaccatttcataaaggacatttttatttttctattctatcatgcggttgtgtttacatgtatttaaacattctattattgttatgtatgaaggttgtttccagctttaagctgttatgaatagtgtttccatggatatttttgtactaaatctttaacaaatctcctattatttccttacaatagattcctacgtgtagaattactaagtaaaagagtataatatttaaatatgtgaatctacatatgtatacatatgacataaataacaatgtttattatagaaaaacatattaatatggacaagcaaatatccataattcttagacttaaagattcatgcagttaatattttgccatataatcttttagaaatgttttatgcatacattgtcataaagtctttgaagggcccattatacttcttgccaaattgctgcccagaggaacatgtaaatatatactcctacttgccatatatgattaccttgattatcataatttaaaaaatcaatatgttgggaaataatatctcattgttatttaattagaatttatataatctaataaggttgattaacatttttcacattgacacttttgtttttttgtgaattaatttactatttatttatcttcctttattccttccttggagggtacagttgtttaaaaatataaaaaaattcaaagaagaaaatgacagtcactcaaatactcatcacacagaattaaccactgcttttattttggcaaaattgctctcagtattttaaatgtttgtaagttggttcatttatacaagtaatataggaaaacattctatcctatcccttttaataaaaaagaacattgtacatcaagctagagtgtcccaactttgatccttccatttttatttatacttcttctgcaaattaaaaactaacatgagtttgagaaggaaacttctaaaaattatacatacatacccacatatggatacaaatgcatctacaaaaagtatatagtcttgtgtctgcattgttcttcaaatctttacttcttcagtcaacatgtttttgaaattccatattgataatattgagccccttcattcctatctggattcatagtgtctgtacatacagatttgtttatcctttctcttattgttggacaccgagtatattgagtttgcacaattattttaaaaggagtttcagttctagtacaaagggctaatacccagaatctacaaagaactcaaataaatttacaagaaaaaaacaaacaaccccatcaaaaagtgggtgaaggatatgaacagacacttctcaaaagaagagacacacgaaaaaatgctcatcatcacagcatctactttttacacctatgggaacttggaattggagggcactgtcagtgtcccgaacctctgtggctgcccatctaagccacctctcctttatgtttgttccctggtacctgtagcatggtatctctggtgactcaccaaaaatctaagcagagataaaatgtcagtctctttttcttgtttagatatctctgaactattcctagggtatattagtctgttctcatgctgctaataaagacatacccaagactgggtaatttataaagggaggtttttttaattgactcacacagttccacatggctggggaggcctcacaatcatagtggaaggtgaatgaggagcaaagtgacgtcttacatgacggcaggcaagagagaaatgcagaatgaaagagggtgaaactccccttataaaaccatcagatctcataagcactcactcactatcacaagaagaacatggaggtaacagcgcctatgatccagttacctcccactgagtcccttccatgaaacatggggattacgggaactacagttcaagttgagatttgggtggggacacagccaaaccatatcacaggagttctcctggcccttactttcctggctgtgggaattggaagaacctctcccagaaacttttatcttcctcccagttctgctccctggggtaggaatggaggagggtggtggtcatgtgttagttctactgaaatgttgcctgtgggcaggctccaggggaaagggttgtccccctatatgggacagttttctgtacttaaagaatgtgaggcccttaatgcctttgttcctagctgtatattatagttagttctagaaaaaaggaaaaaatctcattttgtaccttgtatcatctttttacaattgtttctaagtttttattgttccacacaatgctgttctgaatatactatgccaaccttcttgtacacacgagtatttataatgaagatatctagaagaggatctgctgagtcataaggtgtgcacattttctgttttaatagatactgccaaattgccttccaaagtgactctaccaattcacactctcataacacggcaagaaattacttcccctaaaccttatcatttttgacattaaaggctttttatcttatgtgtgaaaaatagtatctcacttttaatttgctttttcccgatttttatgtaacaatgagtactttttcattggctccttctttttttctcctcttgcgatgtttatctttttacatatgtgtatgagatctttttagagaatgtcaatgctttgtcatagtatatttcactaccattttccccaccaattattagtagttctttagtcagaatgacctttctaaaacttaaatctaatacaacacacctctgcttacaatttgatgtttccaattttcctgaagataaaatttaaactctttaacaaactcctttaggatatatcttctatatacttgttcagctcatcaattatcattgcctgccttatactgtatgtgttccacgcatactgaactatctatggtgatatggtttggctgtgtccccactgaaatctcaacttgtattttatctcccagaattcccatgtgttgtgggaggaacccagggggagataattgaatcatgagggccagtctttccccatgttattcttgtgacagtgaataagtctcatgagatctgatgggtttatcaggggtttctgcttttgcttcttcctcattttctcttgccgccaccatgtaagaaatgcctgtcacctcctgccatgattctgaggccttccccagccatgtggaactgcaagtccaattaaacctctcttccttcccagtctcaggtatgtctttatcagcagcatgaaaatggactaatacagtaaattggtgctgggagtgggatgttgctgaaaagatacccaaaaatgtggaagtgactttggaactgggtaacaggcagtgattggaacagtttggagggctcagaagacaggaacatgttgaaaagtttgtaacttcctagagacttgttgaatggctttgatgaaaatactgatagagacatgaacaaagttcaggctgaggtggtctcagatggagatgaagaacttgttgggaacttgaacaaaggtgactcttgttatgttttagcaaagagactggtggcattttgcccctgccctggagatatgtgcaactttgaacttcagggagatgatttagggtatttggcagaaaagacttctgaacagcaaagcattcaagaggcaacttgggtgctgttaaaaacattccgttttaaaagggaaacagaggataagagtttggaaaatttgcagactgacaatgtgatagaaaacaaaaaaaaaaaacatattttctgtggagaaactctagctggctgcaggaatttgcataagtagcaaggagcctaatgttaatccccaagaccatatggaaaatgtctctagaccatgtcagagaccttcatggcagcccctcccgtcacaggtctggaggcctaggaggaaaaagtggttttgtgggccaggcccagggtccccctgctgtgtgcagcctagcgacttggtgccctgtgtcccaactcctccagctgtggctgaaaaaggccagtgtacagcttgggctgtggctgcagagggtggaagccctaagccttggcagcttccacgtggtattgagcctgtgggtgcacagatgtcaagaattgaggttttggaacctctgccaagatttcagaagatgtatggaaatgcctggatggatgccgaggcaaaagtttgctgcagaggcggtgccctcatggagaacctctgctagggcagtgaggaaaggaaatgtggggtcagagccccctcacagaatccctactggggcactgcctactggagctgtgagatgagggccacagtcctccagaaccccgaacggtggatccactgacagcttgcactgtgcgtcttgaaaagctgtggacactcaatgccagcccatgaaagcagccgggagtgagactgtgccctgcaaagctacaggggtggagacgcccaagaccatgggaacctacctgttgcatcagtgtgacctggatgtgagacctggagtcaaaggagatcattttggagctttaaaattaattgccccactggatttcagacttgcatggtccctgtatccccttagttttggccaatttctcccatttggaactgttgtatttatccaatacctgtaaccccattgtatctaggaagtaactagtttgcttttgattttacaggctcataggtggaagggacttgccttgtctcagatgagcctttggactatggaatttgagttaatgctgaaatgagttaagactttggaggactgttggcaaggcacgattggttttgaaatgtgaggacatgagatttggaggggtcagggttggaatcatatggtttggctgtgtccccaccaaaatctcaacttgacttgtttctcccagaattcccatgagttgtgggacggacctggggtgggggtaattgaatcatgggggccagtttttcccatgctattctcatcatagtgaataaatctcatgagatctgatgggtttatcaggggtttctgcttttgcttcttactcattttctcttgccaccaccatgtaagaagtgcctttcacctcctgccatgattctgaggccttccccagccatgtggaactgcaagtccaattaaacctcttttccttcccagtctcgggaatgtctttatcagcagtgtgaaaactggctaatcaatattctatcccttctcatgcctccctacgttgacacatatttcacctgttgtctctgaaatggccctttacccctttgacttctattcttttttgaagactatactcatgcaccatcttctctagggactcttctctgtgtgagcagaatatcttccacataagcatttaataatttgtatctgacaattgcatgatctctttttaggcaggacttatagtttaataattaataattcttgattttctgatatttagcatagtgccttgcacattgtataatctaatagaaaatattcaaatgaatgaatgaagctaagacatagaaatcatattcagcaagtcattaactatctgaaggaaaatacacatttatttgaagtagttgaggaaataatgtaattatgccttaaaaagtaaaattagtaattgggcaatctgagggaacagattaaaaattgagacataggttatgcaaggattagtgattcaagaaaggaattggttaatgagatggtgctttacagtggaattttctcctagtatgtaagcaaacaggtatcaaaaaccaaagggaacatgatgatttttagtggaggattcaaaaaaaaaggtagctgaaaactggttaggcagtttaaggcaattacacttcttatccacattaagcagatataaatgggctaaagatgagaatgaaagcagaagttgtaaaggggattttgaggaaggccactgaagtacattgagttctcctactcatctcaagggaaaagggaatttatggctgctttttaccctgagcctatgagaaggatttcactggggccactcagagttgatgtacacactagtgtctaatttctgcctgagaatagagtaagacatagtctgagtagctgcagacaaaagaggcctaggcatggctacactaggaggactgtgcacccaacattcactagggggaaaggaagcatgaccatttctcatggaccagtgatagaccaggtataagatagagctgtgtatgagccagagggttgcctgaagaggcaaagcaatatctgcagagataaaccaaagagcctgattttcagcacctgagaatggagcgagtgaccaaactcactagaacagagatcagaggaactgcaggtgaacactcctgagcatggctccaggttctgtgggagcatcaaaggaagcatcactctaaacattcgccaggtccagaaaaagccattattgatgtaaggactttccttaacctttttttcctctttatttctcatgtttcaacccagagtggccagaaactaacaaaatgcagctaaaaggtggaacaatggtgagtaaggagaaaagaagccacctataccttcttccttcactacaggcttcttttaacaatagttcagagctggcagggaggtgtgggggagtggagaggcagcagatgccttacttttgaggctgtttggagtactgaacatatgtagaatgggacatatcaattcttaaattgaaagtaaattaagtatacatgtgccatgctggtgtgctgcacccatgaactcgtcatttaacattaggtatacctcatgtacacatatgtaactaacctgcatgttgtgcacatgttccctaaaatttaaagtataataataaaaaaaaaagagcttatttcgaagcactcttgtgagatgtaagtgtaaagtcacacagttcctgacaaagtaaatgtttgctgttattaagcaggagtgagggagcagacaaatacaataaataattataatctagtaggattaacaaaaaaaagaaagtaaattaagaattatcatgcatataaaagagtgagcctgaattttctataggaacagaaaaaggcagagcctcactaaacaaatgggtagggatggtgacagataaaataaaatggctttctgattttgttccatgaatcatgattgttcagtgtgctgactacatttcactcagagcctggtgaatacttgcagtgaagtggcagctacttcagggctctatgccagggtaaactattttaataatttatgtgttaaatcagttctattatattttacagacgtgtagattccacttgagcgtttccctagatatcaatgcttggattcctcattttttgcctctgtcttctggacctctttggcccagtttagtaagtgaggaggtgcacatataatgaggctcactcagataagctgggatagatttaaatactattcattctggcctcctggatagaatcaatactattgatcagagtggctgagttggccagacagctgctaccccaagaaaaggatctcatcagtctgctgctgaaaactctcagaagaaatggaaacttttgcagaggattttagagaattctctgtgcagtcaggtaagcaaatttatagaagtgaggtatggatgtttgctctgtttttagcattgactctgatattagggatattgtgtgttccattaattataagagtaacacttatttccaaaagaaaggaacgttgctctttatttataggccagtgtgttagtcagagtttgagtggaagcagaataattatgagaattatggtataagacatttattattggagatagaccttatatacttgagagaggacctggataattaaaagtctgaaaaaaaaagttaagatcagaatgacacatcagtaaccagcccaggggtggatgaatgagttggagcttgcagggaaatctggatggtaggcatgtctggaaagggaatgccaatggaagactggtggttcttcaaggctattaattctgtgagtttggagcaaggcatctggtaatgggcctggggtgctattagtcaacatgaccagcagttgggaagaaaaactggatacagagtgagaaagagcctgggctaactagaatcttctgggacctttgtatctctcaccatctctgacttcacagaatggtggctgctgcttctgtctcataaagcttaatttttagcaaactcctatccagaattatatagaaaagaaaagtttgggaaatgtagttctcagcataaccatgttgataagagaacaatctagtacagtggataggcatacatacacacctcatcaaataggcatacatacacactttttaacctatatttaactttcatgtaaagacaataacaaaatgaggattctgtctaacatgatatagctattttttgtaagacttcaagcacacttatattctcccccaaagaagatacatagagtctcaatttaaccatattttgagtgatatttattcctcttttagctgagttacattctcccttggtatcctgttatttaaatagtgagttataaagttgacttatggaatgtaaaaagaaaggaaaaatgaaaaatgagggaaaacaaaagaatcagttaatatccatatacaaatatactcacatcacaatgagagaagtactcttcatagcacagttcatttttctgaagctgttcacatgatcataggtggcagttataacttctttcttccaacacctgtaccatattccctttaccttcagcaagcacttcagctagtcatgttttcttgtccatgaagatgaccaaaacctttatttttacatggagttcttgtagttttccattaaatttgaccacaggacatgggacaattaacagatgcaccagaggagctcctgcattctagacatgatttccccccacttccattgtctagaagcaatgtaatttctttttgatagttgggatcagtcacctcaacactacagcagccctatctttgctcattgttttgctggctcagggagaccaaaattaccaggcagccttaatgacataattactatgccacctgctggaagtctcctacttccattaggaattaagacttgaaaacctgcagaacccatgaagttatgaatttggggaaacattttgctaggtgatcattaggagcactagggtttagctactctcatttccacctaccgaatccctcatctgtaaataccggctaaggaaaaataggaccatatggttgcaaaggaaaatagcatcatggtcacagataaagagtatttacaacatcttgaaggtgatcaacccagccctgcaaggtgttaactagcacactaagtcttcaaaaccccattctaaaatttgactgtttcagggctagggaaatttacaccagtaaatttcataaatacaaggcactttgtttcccaaaaatgagtttcttggttcacaagcaatgttatgtgatatcatccataaaatggaccagtgtaaggaaaggagaggcaatgttcgatgctgtagacaagattatgctgtagggattacgagtttatataaccctgagctagtgcagtgaacaaggctgaccttgccaactgaaaggaaattaattttagtggtcaatgctattaaattttaagtatcattcaccagaacaatagctgggtaccaggtactgggaatatgtttacctactcgaatagctgcaattgtgtctatcaccaagttaagtttacagtaattctctgttaatttttaaaaatccatctgtcttctgcacaggtcagataggcaagtggaattgacatgttgtctggattaccactccattttatatcacctttacagtggcaatgatatttctaatttctccaagagtatgattgcattggtttactattttggtaaacagagtccattctaatggcttctgtgtgacttttcctataataatagacttcaccttatatgtctggaaaccagtgtggagactgccagtttctgagctaccaacttttcactatggaatagagaagataaacataggttgggggtggagatccatagcactgattgtgaaatagacataggtcaaaacttcataaccatatgacccccatatgcccctactctgactgatagagcacacacagtgatatttttggtcttcagaaataactgtcatttcagagctaatgtctaataattcctgaaacgtctggatattccctcttctattcaaatcatcctgacaaatggttaatcatcatactaaggaagactaggagaaagatttgaagtataaattttggcagtgtagtaggattctttcttaaggggccctggcttcctgttcattcaactaagtctggatcagcaaactggctcaagtttgggaaccagttggggctgcaaatctattttgacaaggaaagacacatttctctttgacctagagcttttctcactgataaaagctagattctgatttgctgccgttttactttagtcccaaggataacataatcaattagccaagaccaaagatctcagtggtttcaattattatgaaaaacactgctttgtctctgatcattatagaaggaactattctgcagaattccgcttcttaaatagttttgtgtttgtgttctctagaaatattttgcatgaaatttggaaggcagactagagggagcagccatagtagtgtatgtttagaaggccagtcttggggcaccatgtgctgtagcagctcatgcacgctcttgctgacctttcaattcatgttcatgatagttcctccagttcaggcttgagctcctccttttcatctctgatatgtggctttgcatgtacatcttctggggcagcagctaaaagtgatgttccttccgcttcttcttgatcttttcctttagcttccctatcttgtggtctaggccctacaagagatgcagaagcaacaactaaacctaaactaattcagtagcttctctaagcacataaggtcaagatcctataagaaatctcagattctatattgtacctagtggttctatttttgtgatggaactttaaccgatatattcacattatttctagtacagaagtgcttatactttacttctgccattgtaaaatcacatcattccttctgaatttggagagtccagatcaatgtcagcagcccctagtatcattcccgccctgcagagaatagtcaccaaagagctgttcaagtgtgtgtgggggctctctttctaatgtgtttctcaaagccctggtgaagggagagtcccaagactctcctggacagcagagttaggagagttagggtatagttcagtgagagttacataatgaatttatgtgcataattctgatatttctaagacttggatacctttctttacatataaaaaagtcagtcccagcatttcaacaatattcattgtaggctatgtctggatctaagttttagttcacctttcaggcatactattactgctactctaggccattcaagcaagcacactaaatctggagattttgctacatgcacttatatcaatgcatttagcttgattcaaacaattattcattctaccctgatccagcatgcttaggattcatttccatagtatttgatagtttttaattcaatataaactgggagaaacttgcatttatttaggtgtgtctgaaacattctcatgggtcatgttttgcattttaccccatgcttcctgccaggactttaatccagttataaatttggaagcagtgaatggtgggagtgggtcctacacgggatcggcagtcccttgtaggtaactatctcaggggaatctaatgcatattctttagctatcaggagactaatctactcagacaagggggcaaagtctgcttctactggaaaagaaggctctgcagagtgttcatggtgtgatgttttcagcttcattagaatgtacccattaaaggtcttcatcaaaagtctcaagatcttttccttccccagtcaacggctcaatcccctatcataagaagccgtatgaggttatagattcaatctgaattgtactttagccacacacaggattagacttctggtctgattttcaaaaatcttgtcccagtggttacaggagatttctttttaggataagcatacaagctttatgatttttttgtactggacctttcaatgagaatttaaagccaaagatcatcagtttctttctctaagttctcttataaacttacaattgaccaactaatgtcaaaatgccttttttaactaaaaatttttatagcagcaaccatttggtcacccaaaaaattgccttatatggatgcctgcatacagatgtccatggatgtataaatagttttgtcactgaatgccttggaccagtaatatgctctttaacagtagtgacaaggtcactaacgttcttaagtctaattaggtcataaaaccaattctagattcccattctaaagattctgttccctctctatgtccatatgttctcatcatttagctcccacttataagtgggaacatgtggtatatggttttttattcctgttttgttggctaaggatgatggcctccagctccattcatgtccctgaaaaggacatgatttcattcttttttatggctagatagtatttcatgatgaatatgtaccatgttttctttatccaatctcttattaatgggtatttaagttgattccatgtctttgctgttgtgagtagtgttgcagttaacatatgaatacatgggtctttataatagagtgatttatatttcttttttttattttattattattatactttaagttttagggtacatgtgcacaatgtgcaggttagttacatatgtatacatgtgccatatttctttgggtatatacccagtaatgggattgctggtgaagggtgggaggagggaggagaagagcaggaaaaataactcatgagtactaggctcaatacctgggtgataaaataatctgtacaacaaacccccatgacacaagtttacctatgtaacatacctgaacatgtactcttgaagttaaaataaaagttttaaaaaatgaaaatataataaaagattctgttgtcctagtaccacttctggtaccaataactgtatcagtcaaggttcattcatggaagccggagcatgatgactattataaaatgagaagtttattcaagtaattagacattaaacaattgtggaaggagctggaaagctggaactttcggggaaatgttgaagctggcatatctgattgttagagtaagatctttaagacagactggtaaagaagtttgtaaatgttatttgttcttcccggctactgcctctatgaatttgcaacaaggcatctgatagtgggcctgagatttcttttagtgagcagatatattcattttccattttgacattaccatttaccttaaatttagcagtttaaaacagcacatattatctcatagtttccatgggtcaggggtctgtgcacatgttagcccactcctctccttagggtaataaaaggctatgatcaaggtgtcagccaggcccaggggtgtcttctgaggcttgtggtcttttttaagttcatgtaattcttggcagaattgatttcattgtccttgtagaactaatggagactgtgtctccagggccagtaagaagtgaacctcttgacactgccttttaaatgctcctatgattatgtcagactcacttcagagaagcttccttttgattaattcaaagtcaactgattaggagcctaaaggtgggagtgatattctatcatattcacagcttccacccacactcaagaggagtgcatttttcaagaagagtataccttgcagcaaaaaccttgaatctgtcttagaattatgcttaccactgtagaaatagcagttgagacgagagcttgatgtgtagtagagaagaacctagccaaactgaaatctgccaacacgctgtgtctttctctcattacttttaaacaacgatacacttcagagcataataatgagtgtaataatgactgtcgctttactttttcctcccagaaatcactcctcccagaaatcattcaactctgtctgtccctaagccagaaccttacagggaagggttctgggaaatgcagttcgcagtgtaaccaagttgtcaacagaacaacgaagcattgtcagggtggagaaaatttattaaattgtgctgagcaggaacacttacttcccaaagaatctgttgtatgtaataaaatattattattgtttttatatgaggaggtttccttcctgtactgttcatagagccaacccacatgaactagctcttagtgaaatgaaaccagccattctctatttgtttcaggtataaagaatgatgttttccactctcacttttatgatacagctagagagaaatgaatgtctttctaaaatagaacttcaataaaatcagttttctattttatgctgtttaaatgaacatttgatagcaagagaaggtgactttatttgtaatgttaaatatctgcctttgtcttcatagtattttttttttttaaatctcaggtgactttatttctgtcgtgcttatcatgtctaagcaagagaaagttgcatttatgccattattttggagaaaaggggttttgagtaaatgaagcaagctataaaatcagcacaaattagaaaatgccacaatatccaattacttccaaagaaattagtctgtatttgggaacaaaataaactagcacttagagagaaatgtgagaaactggacaaagggtggaagaacagatgcaagactcatgattttgtcacaaatttcctgtgagacttcctttaagtcgcttcacctctctgaaccttacatttctcatctgcattgccagggctgaggacagtgcctgctacattgtctctgctcaagacctgttgaatcattcaatcacccaatcagcagcttaataaatctatagaaggcttagagttatctttctgccagctttgatactctgtgattctgttacttcctcactctgagtttatagttagatttttattgaccatggtgattacttcaggacttgaacaaaaggcaggacttctcgatggagctgtcagctcaatgctacttcatcccctagaatgccttacatcttgacagctcatgtagactgtcaatctgcagataccagatcaattctaagcctgtggggtaaatgacaatttgagtaagctcccactgcttgctttttctactcctatctgaggtagttacacaaagtataatcataaaaccacgtcatctctgtctcttatagattgatctcacctaggtcctcttagctgattgtcatgctattctcttgtgagtctactcatcttccttacagcagctcttccagatattctactccaatgtctatgcctatccaccactcacatgctattaaaatgacctgcccttttctcttgtacactaaaataaaatcctaagtcccccactgacttggccaaagggaccccagaaaaatcttgaaactgagttactggccatgatgggaagggagatcagatatgcctcattatacccccttccttttgtggtttagacacaacaactgaccagtattaatgttaaagtagagatcataagactgaaataacagaatctttgcagcaataaaatataaaattatgaacacgggctgggcacggtggctgaaacccgtaatcccaacactttgggaggccaaggtgggtggatcacctgaggtcaggagttcgagaccagcctggccaacatggagaaaccccgtctctactaaaaatacaaaaattagccgggtgtggtggcaggcacctgtaatcccagctacttggcaagctgaggcaggagaattgcttgaacccgggaggcggagattgcagtgaacagagatcgccccattgtactccagcctgggtgactgagcaagactccgtctgaaaaaaaaaaaaaattatgaacaggctctgaggccatgccagacaagggttaagtcatgcacccctatagttaaataacgtgttctgatttccataaggtttttctttttctctggtagctaaacaagcactggccttgaaataagcagtcttaaaacaattacaactctagctcacagacgctaactgaacctgttttaccagccataactgtagctgttattggacaagagactgatttcagtgacttccttccagataagaagactagaggctgggcgtggtggctcacacctataatcccagcattttgggaggccgaggtgagcagatcacctgaggtcaggagttcgagaccagcctgaccaacatagagaaaccctatctctactaaaaatatgaaattagctgtgcatgctggcacatgcctataatcccagctactctggaggctgaggcaggagaattgcttgaacccgggaggcggaggttgcgatgagctgagatcacatcattgcactcttgcctgggcaacaagagcaaaactcggtctgaaaaaaaaaaaaaaaaaaaaaaaaaaaaagccaaaggccaaggtctgattgtagtggtttatagaggtcatgcacttgtgtgcttccttgtcctgaaaagacctttggacatataaggcctaattgtaatacatttaaatgttaagtctccacccaaagtaaacataggccatatgttacatgcatgcttgttttatatgcatgtgttaggaccaccttaatgaatatttatagctcctcctataacctgttgaatatgtatgtttagccaacccacttaacataaagttcctaccccatcccctcctacttcaaagtacctgtctctggtcttggccagagacatactttcaagtctgcaggatagtcaccttgcaggcagtaatgccttataagaaatgaagtcttcttctcctttaaaaatatatagatttttttaagttagtacacttcatctcttacttcttttcctcatcatcctgattaaattcaccctcatatctcacaaaaaaatggcttactccctcctacttttcctttctgcttatctccattgctttctcagcttcaaatatcacattgatacaatgatctccaaatctgagtcccacatacagacttacttcctagttttgaaccccacattcctaggtatcttctagatatttgtcctgaagattctgccatgtcctcaaaatcaatatgctttaaactgaaataatcagtttttctcttgttcttccactcatgcaagtgaatgattatgcttcccattactcaggattgaaaatttggtattcgtcatgattcccccttttccctgttctttcatttcaaaattttgtcaagctctgttacttctggtttaattcaagctggttcagtggcaaggcactctgggaccaccatattgttgaatatggaagaggagaggaaggtgtaacagtagaaactgtattggagtatctgcccagctgtagagggctggcttcattggaaggggtcctatggatactatggccctttatgagttactactattggatgtggtggactcaggcatattgagaccaatgttaatatccagattctctaaccagaaggcaggagaactgaaaaggcataaaccatatttgaaatcaagtgtgtggcagtaggagtacaattccagaactccatttttgagggactggtgtagctacttagagcccagggctccactgacacaggtttaccttgttaatcctcctaaagcacacttccatcatttcatttgcctggtcaaaaattatcagaggcaccacagttttgactaaattgtatgcaaaccattttgaagctttcaaagttctcattatgccagtaccaacatcccctttctggttagctgttcgtgctttgtaaatcgaaacttgggttatgatctcaaacctacttcagcaaatagatgcaataagaaaaataaagaaagtttaggtgatagagaatgagatgggttggagtgtgtagtcagggaaggcaactctgataaggtatcatttaacaggaaacttgaaagaagcaaagagcaagtcaccaagatatctaacagaaatgctattaacggcagaggcaataccaatgcaaatgctcccaggcagaagcatgcttggggtgctccagggtcactggggaggccaaacaggctgaagtgcagtgcataaggaaaagcaggacaaggttacgtagggcctttcgtgtgtggtagccaaaagcccgttatttgcaacagtcctggtttatgtctattttccaaacaaattaatagcacctttttatcctggtgtagtgacacatgcctgtaatcccagctactctggaggctgaggccaaaagaccccttgagcccgggaggtcattactgcagtgagcaatgatcaaacctctgcattccagcttggttgacagaataagaccctgccttataagataataataacaataataatagtctctttttcatgccccaatgtatcctggtttgtgtaataaattatttggcctattagaggccaccagataattcaccagacagtttctctaggtctaattattacaggatgagagggtttttaattacaatctcaattgctttaataaatataagattgtttatattttctatttctcaatttttcagtaatacaaaattttgtttctctagtttatctaaattgttaacttcattggtgtaaagtggtgtccataaaatctacatgataccttcttttccattcttgatttaataatttctgttttatttttttcattagttttggcaggagattttcacatttattcatccattcatagcaacagcttttaactttgttgattttctttattcaacatttttttcttacattatttctgttattcttactttcctctactttgtatgggttatattttctcagagttttttcttaacttctggatagttaagtcaccaattttcattttttctaagatatgcatttaagttttgacattttcttctataggcactctaaatttcatcctgcaaatgttgtatggtgtattttcactatcatttagtttaaagcactttcaaaattacattgtgatattttctttgaccttggagttatttagacatgcattgctcaagttactaaaacttgaatactttctagttatttttcattttagcttaattttgatgtgatcagaacatatagttttaataatttcaatactttaaatttctttgacgtttactttttgacttattatatgttaattttgataaatactccatgtatgcttgaagataatgtatcctcttattgtggggtacactcttgtacaaacgtcaattaagtcaattttgttatttgtattttctatgtctttcaaatattgttattcttttatccaggtctcctatcagttactgacaaaagcctgtaaactctgtcttcagttagattccctagatcccaagtctgagatggggattcttgggaaggtgatgtgttgagaatgagggaagtggtgtatggtaagtgcaagaagccaagcaagggcgtgatataagcaggagactgccttctgcctgatcccatgaggagatcaagagcatgaattgcaacacaaagtaggcactactttgaggcaaaacaccagcccactgggtgtgggctgctgcaggggttgggagtctagtttcccaggtaactaaccatcctttgggctaacgacactctatagaaggggcacatagaacagccagcatgcatagtagctagagaatgcgtttaacaacctggtaaagagagtctgggtggttcatcaataaaccccaataaatctaggggccctctctggttatggacttgcctgtatctccttttagtgaactcaatgtttatattatattttttgaaagcatgttattagtacatacaaatgtagaattgttctattttccaaataattattttatcattaagaaatgcctttgctatgctttttttcttaaatatatattgtctgatatattagtaaagccattgaggatttatttctgttagtgacttgatggaatcacttttccattgttttacttccagccattctatattgtgacttttaaattatgtttattataggctgcatatacttgggttttactatctagtctgaaaatctttttctcttaattgaaataagtgtgtacttaaatattttattgagtgagattcacaacataaaatttaccattttaaagtgtacaattaaatgcatttaatacattcacaaagttgtacagctgtcactacaatttagtctccattttcgtcaccctcagagaaaaccccataagcattaagcacttgttccccatttttctatccccagaaacactggcaaccacgaaatcttctttatatatttatgaatttatcaattctggatattttatataaatgaaataatacatgaccttttgtctcggacatttttgcttcacatcacattatcaagattcatctataatgtggcatgtgtcagtactccattcctttttatgtcttaataatattccactgtatagatataccacagtatccactcattagctgatagacatttgtattgttttggctgttgtgaattgggttgccttttggccgttctgagtagtgctgctatgaacattgatgtacaagtatttgtttgaatacctgttttcaattatttggtgtgtatacctaggagtgaacttgctggatgatggtaattctgtttaactttttgaggaactgccaaacagtttttctacaacagctgcacggttttacattctcaccagtagtgtatgagtattccagttttttcacattctcaccccccactattattttccacttttttttggtcattgccacttggtgagacatttactttcaacataagtgctaatatatttggctttatgtttactctcttactattttttaaaatttttcttacatgtataatgtttcattttatctcatctcctggcttttcttggatgaaatattttattgctttatttcttcttgttatttatacatctcactgctatttatactaaataatttactattaatttgtgcttctctgagatgttacagcaatcacttttgacttattataatttaatacaagtgaataaattttctaggaccttagagcactttaactctttctaccttccttttgcctttttgttattgtcgtcatgcattttaattctacaaatatttgtagtgttattctttaagatggtaatatctgtctggatttacttagatattaaccctttctatcattctgtaatccacgcttcatgttcatatttccatctgggcttaattttcttaccgctttagtatttcttcttatgcttgaatatactccccttagtatttctcttagagtgagtatagtggctacaaattatctcagtttctgtttttctggaaatgtctttatttcactattacttttgaaggacatttttactgattataggataaactgacagtcatattttaaatatttaaagtctgtcattttgttctgtcctggcttacatgtttctgtgagaaatcagtggtaaatcttactattgatcctttaaagtattatatcttttattttatgtggtttgcttttattaatttggtctttatatcttagtatttttactctgttataactaggaattacttatttgtatttatcttgcttgttacttatagctacccttgtattcaatatattaatgtcttctcatcagtttttgaagacttttggtcattatatttaaatataatgcatttaaatataatgcatttaaatataatgcatttgctatctcatcccattctggaactgctctgtttcataaacttattatactctctttttggtattttctattctgtttggtccctgttcttcagcatgaatatttccttctgatctatctcttacttcactaaatgtctctttcactatattcaatctgtagtaaaatccatccattcaattcttaattaattctagttaatttattttttattttgagagtttcaatttgattatatttatagagcccagttctctgtgtaatactacttcttgtcatctattttattgttgatattaatcacaattttaaaatctctgataattccatccataggtctgtttctaatgtgtgtttttttctttttttcctcttctttggtatgctattcatttttgactgaaaaaaaaaaaaataaaaccctatctatctatagtttgctcctgcctaggatgtgtctctctaggaccctaaaatgatggcctctggtatttttaagggctcttatttcttggaaggtctaatacctcatttgtctctgctaagctctttgaggttgcttaaaattttgctttacttttaagcagctttctgcttaacttcttaacttttatccctaaatagcttaagaaataggtaaataggttaagtggaaaagaactgttagccttttttccttagtcctttttttttttttttttttctgtctagggtactagcccatcaggtcctggctgtctttgaaaatccagactccaattcccatcttcacatccctatcttatagctaaaaattctgctgacttctctatttaagaaggacattgatatggccacaaataggcaaatatcccaagaagaaaattagtatgcagactgttagcccacctctgtgtgactttcctccttcaaaaatcttaacttctcaagtccttattaccttggcatgtccttatcacattcagctctgtgtgtgtgtgtgtgtgttgatttgtttgtaatttttatctcaactttctagtttattttgatgagagcctcagtctgctacacaatcctccattatagcagcaaattggtatatctgagtatatttcaaaaataaagctggtaatatgggttgacagaatagatgtggggtatggaagatagtgtattatcaaaaataatttctaattaattgtccagagctactaatcagaataataatgtttatattaactgaagtgagaatgattgttactgttcatttttcatagcccaaatcaatgtcagcctgctaaatgatctcaggatacctctgattataatagtatctctgcccacattttgtttttttctttacagtacttggtagtggttacctcatgctgtttttgaatgggagctcgtgtattatagttttttttccctagattctcatctactacatgaatgacttgaataacttatttatcatctctgaagttcccccacgtgaaaatgggcaaaataatattaactattcacagtgttgttgtaaagtttgagtgggacaattcatactgaagtatctgataaaattcctgagaagcaacaataaataaacatgtaatagctacaaagcataatgattatcattataatctgctttatcttccaatttagaatataatattctgaggactctttttccatattaaacagccatgtatttgggttgactctctgctcataaccagccaaactcacccaatagttgtattcctgctgcgtcattgagcattgaggcagtcagtcgttcagtatcccccttttcctccaccaagtacttgttcccagtacgttttccctttctcctcctcctcctcctcttcttttcttcttcctcttcttagtctttcttttttttttttttttttgagatggagtctcgctctgtcacccaggttggagtgcagtggtgcaatctcagttcactgcaacctccacctctcgggttcaagtgattcctctgcctcagcctcctcagtagctgggactacaggtgtgcgcaaccacaccagcgaattttctgtattttagtgagacggggtttcattatgttggccaggatggtctcgatctcctgacctcatgattcgcccacttcagctcttctttctctttctctttcctccttccccatctcctcctcctcctcctgcccatcctcttcttcttcttcctcttcctctttcatcttccatcttcctctttcgtcttcctctttctttcttccttcttcttcttccccatgttattcctgtgtcaggccttccatcagatcacatatcagaccttgattcccattctgcatacttgggtttgcccccaaaattttctctcccctatattaggttctcagttctttcatatgaattttcaacactcacttctccagaatctaattttcattctaaaacttgttcatcactgtctttcttcttaagcctgtgtttggatatgtgtgtgagtgggaatgtgtgggagtgtgtgtgtgtgtgtgtgtgtgtgtgtgtgtgcatgcatactggtgtgagtttttggggtgaggggtgaaggaggagatttttcactatcctacatgggttcttgcagatttaaatttttaataaatataggtcaaatgaataaataagagctattagcaagaaatgataggctgtgatatatttggaccagagcattttatagtcattttcagtatatatagttctgtgagtttaatgtatctatactggacttttcttgttaaaataaaataaataaatataatatgtatattatatttatttataattaaatataagtacatattacattatatataaatgtgtatacacacacacacacacacacagcctgatagtggagaaatcatgtggctcactgtttccaatataaagcaagtaattctgggccttctgttcctactttttcaggtctgtttctctgtggtctagtgttttaaaagttactatgttgattcctagagccttgaaataaaatgcaattttgtgtcctttggagaagcagcataaaatactttgtgacataaaacacaggaaaatttcccccaaatactcttcaagtatttccgttcccacttgtcttctcgagagtcacttattccaaatcctgttcccatctctctcattgctcctcatgtctgctagcactcatcaaactctgtccactctttctacactgcctttcttgtgtaaataaatgcagccctggcttctcccaatcaattagcttcattctttgtcttaattagtgtcaataaatggacgtgggacctagtgatttcaaaaggctccagacagtctttagaaaagactatggaagaaatggggaggcaaagtgagaatattttaatattattctagaatattttaatattttagtatcattagtatttgggaagcacttctagcacttttataattgcataaagctgatatgcatggtttggaaaacccactgagtactattttgacccaagggcaaatcactgaatactactgtatataaaaaaattacaaaggctcacacttagatatacataaagtctaaattaatcttacatatttataaaattagacaatattaatgacacatttgtataacgttctttgatgaacatgggaatagtaacaccaacctgatagaataaagttataagattatatgaggaaattaattcttctaacaaacttttatagagcatttactgtgtgcttactatctgaagatataaagatgacttggttatagccctcaagtaacttgtagaatatatggcaatcaaaaaacagtacaatgtattaaggattatgattgcatataaaagatatagaaataatataaggtgattaactctcatggaggtttggggatgttctagtgtagacttcatgcaagtgattacctgtatctgggagtttgacatgtagacaaaggatggagaggaaatccaagcagaagacacagaaaatacagaattaaatagagagaaacagcttgttttatttggggaccagcaagtgggtgatattttgagaacttcaggtgatacaagctgagctggaggaaattaaggagaatgaggcagaagccagaacataaaggttgtctttgcaactgaaaggaattttggcttcattacctactcaatggagagctacaggaaagcgtcctggtcattagaagtgataagataaggtttatatttttataattattccaaggccattttaatggattgcttgggtgaagtcaatgaaataagttacaaagtcattgtaataattcagaaaagacaagtgtgagagacatacaatgcctgatatatagtaggtgcatgatcaatgatggcttctttcctcatttgacaattctctaggttagtgatggcaggtgtcattgttgccattttacaacttgagtaatttagttgctagtttaagtgactttttcttcgggactcaaatagtaaatggcagggccagagctactaattttacgcttctgttttcagggggtgtttcagtgtctgagaactttgaggatacaaatgaaaatatcaaggttttaagtatatagaatatacattttctgtaaatgactttattttattttattttattattattatactttaagttttagggtacatgtgcacaatgtgcaggttagttacatatgcatacatgtgccatgctggtgtgctgcacccattaactcatcatttagcattaggtatatctcctaatgctatccctcccccctccccccaccccacaacagtccccagagtgtgatgttccccttcctgtgtccatgtgttctcattgttcaattcccacctatgagtgagaatatgtggtgtttggttttttgttcttgtgatagtttactgagaatgatgattttgtaaatgactttcaaaagcctgagtatgaatgagattcttaagtcctgtctgttcagtcatttaacaaatacttttggaaagttattataatcagggagctggggacacagtgaagaaatggacaaagatcttagtctatctgagcttaaattctggtaggtgagtgtttttagagcccccaactaaattggggttccagtaccagagcagctagaaaacctgctctaatgggaaatgataggaagacagaggtggccgtttacagtgtgcctttcatggaatacaccttctacctggcattaatgcctgcttgtctcacctgtgatcaggggcccctcacatagaaacttctttatactggcaaacatccttgtggctcttgtctgacccatgcccagtttgtacttgcctatcagtctggcactgggagcctgaccttgtgttctctccagcatttaaggggacacctggcttaaggcagcccctggttcttctgatggaaggtgcaaaattaataccaacactatataaaatacattcaagggtttattacttacagaccttggacagggagggtgcaacgagtcaaatggaaagagcagtcctccatccctgagtcatgtgaagcagaaataaagaggcatagagacataaagacagacagaaagagacagagagagagaaagagagagagaagggaggcgggcaggtggggtagggcagaaagaaagggaacaaggcaactagcagtatatatatataagggaatagtgtgttagtgtgtgggttgctttacgttcacagtcaatgcctgagttgtttgttcaaaggaagcagccaaaaaaaaaaaaaacaaaaaacaaaagagggagctcagtgtcttaggcaggagagacgcctccaagttcttatgtctttgttcattggcttgagccttttgggtgtagtgtcctcctttgagtgtctaggcagcaccttttgctttggcatttccagttcagtgagtgagatgctcaagaagcaaatggatacactaatcatataattaccaaaaattttaaaaaagataaatctatgcaacaaattgtaagatgattaggggaaataaatgatgaaaaccctatttgataaggtgttcaggaaagacctgtctgaagaagtgacatttcgaatgatcgaaggagcacaactcatgaagatatagaaaaaggtcatctcaggaaggcaaaaggaccatcaaagatgaaggattatcaaagataatgaccctgggatgaactattttatataagttaaggatcagcaagatggtcaatgtgggtgctgctgaatcaataagatgatacctgagaaagaaggagaacacaataaagagtttgtactttaagttattttttccctttccccgagcaaatggatgaagagtgatgctatctactgaaaaaacttgggtgaagcttcagggcaaaatcaacacgtaaggttgagatacctattggaaacctaagtagagatactgaaccacttgaatagattagtggcaactcagggaagagggcaatgacagcaatacaaatgcagaaggaatcagcaaacaaaatgtatttaaagctatgaaatcaggtaaaattattttgtgaatgagtatatgtagaaacgagggaaaggactggggtctgataaagtttacatttagggaagaggaggagttcctagcaagtaaaactgagaagcagctaatgaggaaggagagacaccaaaagaaaggaatttcccagaaaccgagtgactaaagggtttaagaaagaagaaataaccaactgtgtcaaatgtttccaagaggtcaaataagatgaggactgaacattgaccaacggatttgagaagatgagggtaatattagttaccttgacatgtggcttttgcagagtgatggagatgaaggccaaatggaagtgggttactagaaaaagggaagtacagaagtgaacagcatgatggcacatatcctgtccaggagtttactatacagggcatctgcgaagtagaactgtagctagagggggtcatagggtactagaggagagatttagaaatgagagttattacagactactcatgtgataatgagaacaatgcagtagagagacaaaatgatgtgccaaagagtgtgggcaaggaatgtcctacaggataaactcatgctgacccaagaagtgacttaagcctgtgagcaaactcagtgaggagaaaaccagcaccactaatatttattgcaagcattccactatttattgcaagcattgaactatcatgtgcaagcattccattaagctcttccctttgtaacacttacagcacaactccatagtataggtattattatttcttccaatttataggtgaaggaagtgtatctgggagggttccaataacttgcccaaagtaacaacaataataaatggtagaacttaatttcaaacctgagtctgtcagcttgtgcatttaattactctcctgtgtaggagccagaatttctgtccagctcagtgtggaatacttctatgcaatcagaaattatatttcctactccttgctgctgcctaaaatttttattaaaaagatcaatgccttagtaatagtctcatatctcacagtttcggttaacactaacatcagagtttcaagatgcctagaaactcaacctaaaagttactatttcatataaattttcctgaggacaggttatttgagcatgcaccatgcagtagacattttatcattttgcctgcacttcctcaatttaattaaaaaattctaatgagctatattgaactaaacactgagctagttggtgggcatatgtaaatatagaagatgaagtttctgcccccagatgtttcaagcaggaggcatattctgggtggatagtgtcttctctacggtaattctctcaacagaattgagttgggatcttttaggtccccacatgatttattaccagcacaaatataagcaaagtcttagatttagggaacagagagaaaggagatagacagccaatctgtcagaaaactttttttttcaaaaagaaagatgattgtttgattttctatccatcccaaaaagaatgtggggaagtttgtaaagatacagaatatgagttaacatcattaaggacacaaattaaagaaaagaaaaataagataacatcaggtcaagggtagggactgaatacctcccatgagttgacaagatttagccagaggtggggaaagaatccacatataaatacagtgcagatgctctctaactggatggaaatggaataattatgttaatttgtccctttttatactcagagatggcttttaattcttttcaaggattcagaattagaatatgtccacattatttggcccttgcctcaatctctcctttcaggacaaaacaaccctctagtgtgaccttcacgcagtatagattactctcctgaagatcaggttagcaggttgtcttgcttttacaccattcacatgtgcccacctggctgttgggcagatgttctcctgtagggtacaaaaatctcccaacattaagttttaattgcatctccataattgttgtttaaatgttggcattcattttatgagctgatttttctatgctaatcagtgctcaattcaaatcagaacaaacaaacaatcacaacaacaagaaaaacaagacctcttctatatttatagctggtgactaaaatagtaccataaatcctgactgtgactgactaattgcttgaaatctaacacaggaccaacagagactctctctctctttgcacagctttcattgcttaaacaaaagctactctgatttgtttgggaatcaatttgatttgagaaggcactggggctctgtcagtaagcaacgaacaaagtacaatttccttttaatggaattgggattatgctttgaggacattgctttttcccttcttaagggaatcgggagaatgaagttgggaactctttgccagtggcaaaacataggagccagttgatcagaacctctggtgctttttttcaaactgcttgggcaatagaaatgagagaaagattcccagttctcaagaatgtgattaatgaaagcattagagagatcatttaatggcatggagtgggtttgaaaatttggtgtcaaatggtttggttctgatatagatttagcacggatatggatctaaccaaaactgttatgtgattttgtttaaccccaggtgtgttccaaatcttaaattatttttgcagtaaaaacttgatataagtaattcattttctatagggtcattttagggattaagtgggaaaatatgttttaaaattttgtagatgattaagagctaaataacaagaaaacattgtatcttaaaatattgtttttggttgatacattctagaatcttctgaactctctactccaatttttgatagaaataggtgggtatctgaattctatggtttagaacaaatagaaatttctgctatttttggcttcaggtttattactcaataaattatggatttgctatggtcttaaagttagaaaaatttaatcagtgtaaaacaccaattccaaagacagttattttcaagctcttttcccatttggttgacaggaacccaattcttgaagaggtttttcatttcagcatcaggtcctctaataattaaagtgatgcttttgcagcagatcttccttcacacccaagtacattaccggattttagcaccaatcaaataatgagtcaaaagaatattagatgtatttctgattgtcctagtatgggttacaatttgttatcttgataagaaggcctggagacagaagaggagaatagaactttagttacaaatgtccctattgctaagatggctgctgtgatttaaaaaaaagtcctggtcttaggctgctgaaatgtgccaatctttttaggttcagcatttatagggccgtttctccacccatgatttctggttcaacattgactgcttcgtgatatctgttctcagcagtatgtggttttgttcctttaatgggaatctagacaattctttttatagcaattcaagtaagctcagatattacagacacttagtcctcagcaatataagctcagcaatataaaatccagacagtaagggtagaagcagggagaacagataggaggtgattgaaattatcaaaaatctatggcagagcttctcaaattttaacatgcaaaggaattatagagaaacttgtgaaactgtagaacgtagtggggtgagccttgagattatgcatttctatgagctccaagatgatgctgacactgttggttcatggaacacactttgggtagcaaggatctatggtgtgcgtatgctttttttctgctcctgtgcctttctcctttgacttgacactttagagaagtggttttctactcaagctgcccattaaatccaactgtattaaaaaatactgggctgggcacggtggctcatgcctgtaatcccagcactttgggaggccgaggtgggcggatcacgaggtcaggagatagaggccatcctggttaacatggtgaaacctcgtctctactgaaaatacaaaaaattagccaagcatggtggcacatgcctgtagtctcagctactcaggaggctggggcaggagaatcacttgaacccgggaggtagaggttgcagtgagctgagatcgcaccactgcactccagcctgggctacagagcgagaatctgtctcaaaaaaaaaaaaaaaagaaagaaaagaaaagaaaaagaaaaatgctgatgtctgacctcacatccccggaattctggtttaattattctggtggaagactgaaacatgaatacttttaaaaagctctccaaataattctaatgcacagtcaggactgagaggtctggttttagtttatctggcttcaccatttgatgccactttcaggtctctgttggatccatgcttcacagcatgcaaacaagttgttacccatccaagtaagccagaactttgctgcagtactatgctgcagacctgacttgtccagcaaagaaattacagcagatggccactatctctccactgggggaccttaactcatcatgttcccacagaatcttttttcttccttaaattttgccattttttttccaatatatctatgtctcccttattttgcaactcaaggaaggggctgtgtcatatccatttttattttatcagtataatgcctggcataaactagcaatctgtacagatgcacagaataaatgaaatggattgttttagtgtgcttggtgggctttcagaacttaaaattcttaagtgaggcattaatatatggaatgtggatgatatgcatagctgcctccatttcccaaatataggcaagaaaaacctagttaaaaaaaaaaacagaccaaaataaacattagtttatgtcacacagaattgtcctactgaaaatttcagaataatgttactcatatcataatttctaacacttatttattgagcttactatcatattactggatactttaaaaaagtatatatatatatatgtatgtatatatgtgcatatatatgtatgtatagatgtatatatgtgcatatacacatatatgtgtgtgtaatatttaagcctcaaaatgaccatgaacagtacatgctattataactcccctttttctggaaagataattctggcatgaagaggttacatttggtttgaatcccatagtaagtggcagaactgggatttaaactaagcagtttgtgtccagagactgtatcctaaccactacactacactacactttctgcataccccacaggccactgatgacctgtccagttctaaagcaagtgaggctattgaagctggcatttccctgatcccttcatgggactcataaaggggatgccctgtttactgagcccacagctctcgactccttgcaggaggtagcacgtgagcaaatgaggtgagtactggggcatacaagtgctggagtgagctggccatgctggcactggcaggagtgaactcctctcacttggactcattacgttccatccctcatgagaagggggggcacgcaggtgagcaggtgcaggagcttgggcgagtgctttttggcaccagcaggagccaattctgtgctgggcctgtgacagcatcttgcagggggtgtctccaactccctgaagccccagaagcagtgttacagtgctcttgtcattctgccatctgcagatggcttaggcattaacagctcagtggaccctcttccttttcatgtgaggtgactgccttctgccagtgagggcaaagcgtcatttacatccacgctcatggctcttgagttcttgttgggcatccagaaggaatgaggtcacgtgaacaaattgaaggatggtaaatgtgggggattttactgctgatggaggtggctgtcagtgggaaagggagctgaaaaggggatggggcgggaaggtaatcttcccctaaagtccaactatctctgactggattcttatccaaagttatgccatgaagctgtcccgctgaagtaaagctgctactctccagtatccaaccgtagtcttcaatgtttagctgcttctcctctctgccagatgcgtctggggttcttataggcacaggatggggttgggtggggccatgggtggttttggaaaaagcaacattcaagtgggaaaacaaggatataagttctcactttgggccatggtctcaggcttgtcagcttaaggatggagcccttgccagggatccgccctcttctgcccagaattttcctgcctcctgtccctaccactatcacccttatattaaaacacatgctcctgttttgtttgtttttgatatttactggttatatctcatgttatgctcataatcaactttcatcttaattttttaatgccacaaaatcccttcaattatgttcttgtatatttaattactctctataatcttaatttttacatcagcttataaataaccttaaagctctagaattaaaaaatcaagcaaataaaaaataaaaatccctctctgaaattcatatttatcttcaattgccaccccatctctctcattttccctttattcttattacagtatattatttcccttattcttattacagtatattattataattatattttatacccattcttcaactgtgattttatccttaattcagtgtagcctgatacctaccctcatcattccgttaaaaaccattctcattctaccacctgtgatttccatactattaatctcctttaaccccattaattttcaggacttgaattatttgatctttcagaagctctgacagtgttattaaaacactctttcctttgatttccatgatgcttcatgattatgatttttattctgcttctctggctgattatcattcttcttcgcagactcatcctcatctatgtagtaattaatggaattcctcaagctttactcctatgccctctttccccttactcaatgatctctttgtagatgatattctccacctgcattagtctattcttgcaatgctataaagaaacacccgaggctgggtaatttataaagaaaagagatttagctgacccacagttctgcaggctgtacaggaagaaaggtgctgacatctgcttctgctgaagcctcaggaagcttccaatcatggcagaaggtgaagggggatcaggtgactcacatggaaaaagcatgagtaacagagagagggaggaggtgctaggctgtttaaaaaaccagctttttcctgtgaactcatggaaggaaaactcactcattaccacgaaaatagcaccaagccattcatgaaagatctgttcccatgatccaaacacctcccaccaggtcccacttccaaaagtggggattatattttcaacatgagatttggagggaaccaacatccaaaccgtattaccaccctaagatttttttaccgcaatatttggggtagacatttcttctgagctcccaatagcctatttggacaaactttttaatgtttcaggagtccatcaagattagcgtgccccatgctgaaccaactgttttctccatgtatccccctctttaaaaaaaaaaaagtcacagtgggtggtaccttattacatctagttatgcaattctcactcccagttgtctttctcatttttccagcatttctttttatttctaccacttctacttcctaattgctatgtctacaataattctcacatattctttttgttctccacactggagatttttaaaaaatatatatgttttatttcatgttattaataaaatattttatcttaaaagtaaacctgatcatgtcaccaaaacagaaaccaaaacaaacaaaacttccctattccttccactttcagttaaaaacacttcttataagtcttaggacaaggaccaagttcctcaccatggcccaagagtctgtgatgttttgccctcacctacttctgtaatctaattgtgtaatatttctctcctgctcatcccctactatatgcctccacttcagctgcattatatttcaggtatattagtcttcaacttctacaatcccccttattcctcctccacagagctttaacctatgctgtttttctgaatggagcactgattgctcctcttctcctctcaagttactatttgctcttcgggtctcgattcatcattatttttttaagaaattaatccctaatattgcttactaggttacatttctctacaacttgatctcacagtagtctgtcttttccatttttagcactgatccaagtttaatgtaaaattaaatttttgtcaatatctgtcttcctcattaaactagaagggtcatgaggagagagaccatatctatgtatgcttatttttattcccaacaccaagcaatggctggtacaaggagtcacgaaaaagatatttttagtggttgaaaaagtgtcattcatactgactattgttaagatcatttaagacttgctgtacttaggaaggttttctgcacttaggaaagttttctgctatttttttttccattttgtagaagtcaaaagttattccagccttgatagtttttctgaggccccatacaatgcttatttgaaacttaactcttgattttctcaagtacttttttattctaagttacacaaagctgtattagtcatctaaatgttaatattgacccttgaaaatcactttgtcttccccactacagaatctagcaccctctcttcaccctctcagcctaaaccctgcgcaaacttcccctcgattctcttctccagctgacaggctggttctgggggagacgaagaacatggagacaaggacttttttctcctttttcacactttggtcagttgacaagtatttgagtctgtgtcttcgcttttctatttatgagtgattctgggagatatttaataatttttcaaccatttccgtctttttttctcttgttttttaatttttaatttttattttaagttccggggtacatgtgaaggatgtgcaggtttgttaacataggtaaatgtgtgccatggtggtttgctgcacctaccaacccatcacctaggttttaagcccagcatgcattagccatttttcctaagggcatttcagtctttccaggtgattctcctcctctctcccctgcctggcacacacagactcacacatgtctgagaggcagagattcatcacagattcttacctgtggcaacagatgctcactgcagaaatcagcttcagattgattcacataagacaatcatccttccaaagacagagttcccacagtaagagaggagaacacgttcaaattagagttgaataaataaaaatgaagagtgcaacagagagaggaccacacatgtaagaaccactcattgagtgtcagagtgtcattgtggcaaataacataaagattacctagttcagctgccttcttttatagattaggaaacggaggccaaaagagtttggaaaatttgcccctgtagcaaaaatagctatttcaggagcaagaatcttctgttttccaggcttattcagagacaagtcactgcatgcctataggtgtctatgacattgccagcctctctggatagtgtcttgtctatcccattgaaaacttcactgtctctcatctttgaactaaagttattttaaaaagtctgaaaggcaaacaaatctaaatggtaactttcctttacatatttcctagaagatcttagaagttatttttggtcctatccttggtccccacacaaaaaaaggatcatcgtatgtatttctactgggtgaatatttctactaatccttgaaccagttttcacctgacattgggcatttagttctaagaagtggggcaaggcagtatagaactagctataattaaaaaggcgggaaaaagatgttttaagtggctataggagagtaaagaagacatgtctctggctacctgacattggttatttgttgttataggtaggaaatgaccaaaatctagaagacaggctgttggtctgtaatgattgaagttcagttcctaactctatgagattagatgctatttttctcaccttcatcctgagatctattttttctttaacattaaaaatcactaaggaaaatttctgagtacatttcaggggatgctatttttcaacaagtattcttaaaggcatgtaatacatgaggtgcctttatagatgcctgatatctcccttcccttctccctctaaaacagtaaccaagatagatagaggcttatttcacatttcactcatatttgagcacatggaagcagctttcagcctctctggcctgaagggattatcctggcttctgcatcctccatctaagatgtacagtaagaactaaataaatggcagaattattttgaatattacactgaattcccaacttaatgaattacttcctgaaaactagattcgtacctgtataaaatactgccatgcatctctatcctccatttttcttggtgtattcggttggtgcaaaatacccatatctatgttcctgcctgctgtgacctcagtatcccccaataacctatccagagccatccatgggctaagctgcctcttgttgcccatctctagggtctccaaatagaaagttatttttcttagacgagatatcctccccttaccaatagtaaacttttctctttttcgtttttgatacctggtctattctatggacacgtcaaattaataatctcatgttctttccagtgtagaaggccttccatggcaagtcatatcatgagctaagccacttgtggattgcctaggcaagcaaatctcttttatcctgattcattggttttcactcttcatgttcaatcaagggtctgcctgccttgctactgattctatctccaatcctggctcttcccagggcaaactgtggcctagctcctgtgactgcttaggatattagggaaaacctataactacagagataagctaattgacaatttatgattttcaaagtaaaccatattattaaattttggcccaattccttcattgacactaagtgcttggtcattcaaaatattttttcatttgttttaaggcatcaataatgatactaatcaaagccttccaaactaattagatcaagtgacatctatctggataaaacaaattacaattatgaggtttatgctgatcaatactaaaaccaaaagaagatattattagtggaaagattgtttcactggcagtatgtatgagacattgaggaggtcagatcacttgccttgggcaatcagaataatttagaatcagagagctggaataaaccttgagcatattataatgagacatcctcacatctagagcatccttgatggtggcctgagaatgcaaagccagcaatgacaaatgacaggtggccattctctctggtacatgtgtctcaaaattgtcaaaactacaagaatgacaagaaggaaaggaagttttacaaagtaattctgttgacttttgagagcaacttaaattcagattttcagataagaaagctaatttccatagcagttattatatagagtttgccaaaagaattatttaggataattattgctatacatacctgctgtatgccagacactgtatttttataaccctcacagaacactatgaagtaggtattaacggatccattttataaatgaaaaatcagataggccagtaaggtgaactttgtctagaattattcagctaataagtagaaaaaaaatggatttggacccagaaatgcctgacaccagttctatggtcttttcaaagcactttgcttttcttcatttcattcagaaagccatgctttttataagttgcttctgatttcaacttaggtgataacttttatcatccaggcattatatgatatattatacaaaacattttgtttcaaaatagatggctatttatgtggtgatctggggaaacattatttcacctgaattaggccacaagcatatcactgtcactaatgtaatgatgagaatacacaaccgatgcaaatttgaagacaaggaagccaggaagggtgtatcaatttgaaagatgtgttattttgtattggatgttagagaaaagaagaaaagggacaaataggtggcaaagactgcttataagctgctatgagatttttgctgtatttgaagggagtgcaggaagagctttttggctgaacaactgtccatgtgggtagagtcaggagtggttagttttgaagcatcttagttctaaggcacctacacataaatctgtctcgttcttcttaccagtgactgaattcacttctgttttatttcagccaaagaaaattttaaatctatagtggattgagtagtggctcaatagagttctgtccaaatccttatcctcagtactgtgaatgtgagcttatttagaaatggggtgatatggtttggctgtgttcccaccccaaatttcatcttgatttgtaatccccataatctccatgatccccacgtgtaaagggagagacgaggtagaggtaactgaatcatgggtgctgtttcccccacgttgttcttgtgatagtgagttctcatgagatctgatggtttcataagtgtttggtacttcctcctgcattcatttatcaccccctgctgccttgtgaagaaggtgtcttgcttcgccttcaccttccaccatggttgtaagtttcctgaggcctcttcacccatgcagaactgtgaatcaattaaacttctttcctttctaaattacccagtctcgggcagttcgttatagcagtgtaagaacagactagtacatggtgtctttgcagatgtaattatgttaaaaatctagagatgagataatcctagaattagtggatgggccctaaatccaatgaaatgtgtccttataaaagacagaagcagaaaagacagaggagaagaaagacaaaggaagaagcttgtaaagacagaggtagaaatgaattgtactgccagaggccatggaacagctacagtgaccagaagctggaaggggcaagtgagaattctcccctggtgcacacagaggagtcccaccagcatcttgacttcagacttctaacctccacaattgtgagaaaatacatttgtgttgttttaagtcacccagttggtggtaatttgtatagaagccttagggaacgaatacaaagtccaaataaaaatctgtctccctcaaatctttctattctttgctctggccaagagggagtagatccttcacccttctcgtaaactatatgcaacgtcattatgcacgaactgaaatgtattcacactttaccatgtcagcttgaagttctcaatccctacaataaatctgaccattaagggtttgaacacatagttgagaaaagccagaaagagccctgggatcacttttccgaatgctttctttcttatccatcaaagtccactgcaaaatgctgtgtctataaaacccatgccaatatttctaggaatgagaatagcaagagaatggactactcgcttggatttaacagttgggtggatctgtaatcatttgggagtaacaatattctcaatatgttcccctctctctttaagttttattttagataatatagtcagagttgttagttgatcagatatggtacgattttgtatattgtggcatgaaagataaactgaactttttctactgcaatcgccaatcccattttttagtaagcatttcagctacccaggaaaagtgttttcctgctgataaatttaagcatggaaccataaaacactggctgttccttccctccacatgccttcttcacttgcattcctaaacaagctgcactccaaatcccatgtctgcttaagcacccacaactcttaatggtgactttttaataactggaggttttggataaggggagttttggcagagtattcagaagtttgggtttaacctaatcttgagaaaatgtcaggttctggaatggatacaactatccagaagctcaaacacttaaatgcataaaattagggaaattttttcctttgttttttctcaatgtcttatacaatagtacactttaagctttttcattgaagtatttctatgctgccattctcagattcaggttcaactaatatctattaaatatctataacctcccagagaaggttggatgatttacatactttatctcattaaatcctggaaaataacaacgtaaaggcaggaattattatccctttttatctttacagcagataaagaagctaagggacagaaaaatttaattactcatcccaaatttaccctgaataaatctcagagctatgactccaactctggtctttagatctaaatttattatttatttcccatttctttttgtttaaaaagttgaattggtcaagcatttcttaatatgccatgtatataaattcaggtattctgaatgggcattatttcacagtagcacttaccatggcagtaactgcagaaaatgagttcttcagagtaagttatagttgaagatcattatgtacagggaaatttaattttataaaaaaccaaattggccttcaaactgcaagcatttaaattttaatgtgctaattttaattaagtttaattaatgctgctgagcttggtaaatttaaagaacttcaaatgatacccccagaagctctgaaacatctttcttatttgtcaaaacctgccttctggcagaatcccaactcatgccttcacagaaattgcttactctttgctctttctgaatccattctatcatttatccatttgttatgaaatctgatttgtaactgaatctttgtccaatactttatcagagagagctatgaactctgggattattcatgatcttaaatagtgcaactgagttctgctgccctccatttatagctgggctgtgtcttctaggtttgctccaattcatggtgcgtcttgttacatatatcacaactggttcttcagggatgaaggttctacccctatttccaccttgcaaattaatgttgagggaaagacctgagagcctagcatctcatcctccagagtttccagattctgtgtctggattcttgaaagatacagcgtagatgtcctttaaaaccccaagtggaggtagagcatggagctgatcattcagatttgaaggtagcagaaacattctggaagctgttagagtgaagagctttagagttttttagattgaagactctagagaactctgacatttaaactcctaatgtcagttcatgtaacagttaggaaatttttcttaaaactgcctcaggctcttcagccaagttccttactattttcaggtctccacatgactctgtcactctctgccattctatttcaccttttctccagaggtcacataactctaccttcctgactgttatccaagatgagtaatacttgtccttacataaattcagtctcaccacctgtgcaccagcacctagcccaccacatctcaaaaacttgactttaggaactcttcatttatctcacattatctctctctgctacaaaaagacatttctcttataaacatgctgctgactctcccaccttaaaacaaatctccaaataaaactaaaacaaaatttctcttgatttcatttccctgccagctaccacctcatttctttgctcctatgtatagaaaaaaatgtttaaattgttgttcctattcactatctctaattcttcagctcctattttattttaaaggctcctagtgggcttttatttatagtaccagtttgcagcgactttcctaagacattattttctaactactgattagctcttgtacttatcttgcatatcccaagagcagaagttatcatggtggaccacttcttttacatcagcttccaggtgccatactctcccagatctcatcctacatcaatcataattgctttgtcttagtctcacttgctagttttccctctttatcccatgacttccaaatttatatccaggggagacctctctcttaaaactcaaggcccatatagtctactgccttcttaaatatagtatttaacatgtcaaaactaaactctggaaaacatgctctctcatatgcaaacctgtgccacctgcagtctttcccttctcagttggtggcaagggcatctttcaattgcccagttcaaaaaacggtaagttgactcctctgtttatcacataggtgatatccaatccactgggaaatcctgttggttctagcttcagaatatattcaaaagctgtacacttcttacaccattcactacaacacccctgttgcaagtcaccatcatcttaaggctgtactattccattagctacctaactggtctcctcccatcagcccttgctgcccctcagcctgtcctcaacagaacagccagtgtatcctcctaaaacacacgtcaaatcatgtcattcttttatcccaaagccttcaatgacagcccatttaattctgggtaaaagccaaggtcttggcattttatagtagatgtaatggttatgtcacagtaactgctattcatgacacaaattaatcatttacttattataaaaactaaaagaaattgtgtcccttaagaaattctctaaatttttgtagtgaaaaagaaagtttggtagaatgatatgtgaaaggtaaaaaaaaaaaaatcagacatttttaatatagtcaactcaagaagcaaatattgaacatctgagataattaaaacagcacattagataagctagagattaaaatacatagactagaattttagggactcatatgcagttgaaccttcaacaacacggtattggggcattggcccccctcatggtaaaaaatctgcatataacttttgactcccccacaacttaaatactaatagtttactgttgaccttatgaataacataagtagtcaattaacatatattttgtatatatattatatactatattataataaagtaagctagggaaaataaaatactatttaaaaaatgaggtagagaaaatatatttactattcattaaatagaagtggatcatcatgaagatcttcaaccttttcatcatcagattgacaaggctgaggaggaagagaaagaggagaagttggtcttgccaattcaggggtggtagaggcaaagaagatctgcatataagtagacatgcacagttcaaacctgtgttgttcaagggtcagctatagatacatattcatacagactcatgacatatgagtgattcttacaagtcaaattgtgatcatgctttagtaaaggtacaaagtctaagagatcatagagtaggatctgagaatgaattgatatttagagttttgttctttggatgagatttggaaagaccttgtggtgaaggatgggtgttaatgctgaagaaagacattgcatagagaaggaaaacataggaggaaataaaaggggaaaatgttccaaacatactatgtaaatagtcaggacattgagggttaaaatgcttagttggaagtgaaggatagggaagttgtatgtagcacacaggcagagacaagtggcaaaagatttgaaagagctgatgactgtggatgcagtatgttttttttttttttgagatggagtcttgctctatcacccaggctggagtgcagtggcgcgatctcggctcactgaaacctctgcctcccgggttcaagtgattctcctgcctcagcctcctgagtagctgggactacagatatgcacctccacattcggctaatttttgtatttttagtagagatggggtttcaacatgttggccagctggtcttgaactcctgacttcaagtgatccactcacctcagcctcgcaaagtgatggtattacaggtgtgagccaccatgcctggtctgatgcagtatcttgcatgtcaagccaataaatgtataagcttttctttattccaagagaagccattaaaaatgttgaagagagtgctttacttgattcacagttttagttcaattaacccaattataatttattaaatagccaatctgtcctcattattatcctagatagtttgatattcataaaaatcactcaggctattggacaaaaatacaaatttcagacttacatccaaataagagctggtagatctggcatgggtcccagatatccatatttagcacaagcccgtgaatgactccgggcaattggtgtgaagactcaatttggtaaaatactaatgtacaacataaaaagtggtagaaaccttgttagctgtgctatccaacatcctgtattttaacttgggaatcaagatttctattccaagtctgcaaagataaaaaaaccttgaaggtatgtgatacagacataaaatgctctcttgacacatgtgatttctaattcttatgaagtcaaatgtatcaatttatttttctaagcatatatttatatatatatttacttagatgtatattttctaagtaatatatatatttacttgtatatatattttctaagtatatatttatatatttatacttagaaaaatctccatgacatttatctttacaagaagtattgtaatttatgaatagtttcacattaaagttttctaggttttgtttttctgaaaagtggaaaataatgcgctaatttaatttttgaaacccactaatttccccaattatttgttaaatataccaccctttctaagtttatttgtgatttttctttttaatcatatgccatataggaaattaggttgaaataaggtgaaaaccaaaaattatattaatatataatttgctcttctttcaattttaaaacctcaaaaaattaaagaatagtaaagtgaacatcaatatggtcctctcttaggttcaataactcttttctcggcttgatcctagtccccattttatctcaaggagaagagaaagactctgtatcccaaggagagagtagaatcacaaaactgtatttttccagatcttttttcaacaacgaaagatgcattacaaactagctgtgtaccttgagcaattcatatggactggtgtcatgagaatagcactgaaatctgacttggagccttataatgtagatcagactttgtcccttactcttactatgaccaataataaagtcattgatcatagacttctgtttttcattatgtcaaatggggagcaaataataggttaaaatgggaaaatgtattagcacagagagaacaactcaattaggtaaacatcttttgaatattatgtatgctgactagatgagcgaaagggatagagaaggatcaggtggtgtggagataaataagatatacagtgagtgcttaggagatattaagataatagaaaggatgattttatattttaaactccaagatggtgaacaaaaacaaaatgtggtgaatttcagagtgatccaaacatggaaatgggcctaggtatgtgattaatgacaaagaacaggtaggcaaattactagttattaaaagtcatattttactcatgatctatgttggaatgcaaagtattacacgattttcagcagtaatttgttatattgataatgcatgccatggaagaagctgggtagcacttggtaatacaaagttttcaaaatacaaagtggtaagtagtagattcagttaattagtaatggataatccatgtacaattcctgccttccagaaggcaacagttggagataacaatgacaatactaaaggtattaaaaagaatatagagagatggccacacctaaaagatggacagagagaatatccatgtggtgattaagtcgtgcatggtgaagtaggaatgtatgatgggggagaaagccctgattggctttctatagtcatcgacactggcaaaaaaatacccattagctgaatttctgttatctggtccactcctctcctgttatgtgtgactatttatgggacagcaaatactcaaaaaagtttcatggttaatgagtgggttaatgaacccacagaaagcactttaattaattccccttgtggcaagaaccaggagacaggactgaacctgagcacttgcactggagatgtgcaaaatcctagcactagtacatagatgacatctgagaagaagaactacagtctgcattctacctgagaatattcttaggataattgacaattaaatatttttcaaaatgtggattcatatgagtaaaattgaattctcttttttccctccacaaattgacatctctttgaaatcaacagcctcatcaatttcccaatcacctacacttgaagaactgcatgtcattttttatgttcattctttcacaagtcagtaatttaaaaaatttaacaattacttattgagaactgagtgttgtgcatcacactatataatgtacttaattacctaattttattctgtcaaaacctttctgaggtaagtattattagctgattatacagatgaggaaagcaaaactgataaagtaatttgattacagttttcctgctgtatcaaccaaaatttaacataaatgaatgcctattacacacacacgtgtgcgtgcacacacacacacatgcatgcatgcacatagttcaaatggatccgcatcctcaaataatacattttaaggacaagaaaaggaggaagaggaaacctgtaaattaaaagatacttagtagacatatacatatgtattttgataatggaagaaaaactgtagggtttgaagatgcacatctggatgaaaaattgtaaaataaatacaaggaataaaaaattgaggtagtgattaccacttgagagaagggagtggattgagaaccagagagtaaagtatgttttctagtaagtttctcaagaaaagatcatgggaataaatttccctgagtccttgcatgttactagcagtttattccttcccacttgaaagtcagttgagctggatataaaatctgtggttcatattttctctccttactatctcttaatactcgtaacaactgaaacatgctatttcattttcttctggcatacaatgttttgatataattttgtttcccttacaagtcacttttttgcttagttaccttggaggttttatatatcattctttttcttcaaagttacattattttgctatattatattttgacgttggtcattctgggttacatagtatccagtttgatatgtagtctcaagtcttttttaatgtaataaatatttttgaaatataatttaatattctgttctctttgattttcagagactcttatcatctataagttgaatcttttctgcttatactttgtatttttggaagctttttatcttttaattttttgttgatttttcaatttttcatcctttgcaccttctatgttttctatggcaacatcattttgtttatcccttttaggtttcttgcaatttagcctttgtattagttctctactgctgcataacaagttgtcacaaaatttaatgacttaaactaacaataaaaattatttctcacgatttttttctgagtcaagaattctggcatggcttggctgagcagtttgactcagagactcttatggggttgcagttatttgaagaactgattgaaggatgaaagatttactttcaaggtagctaatgcatatggctggcaagctgatgaagacgattagcaggaggtctcagctcctctctgtgttggcctttccacagtactaacaaacagaatgagctcaacaggtagaagatagcttctcccaaaacaagagatcaaagaggctaaatggaaaatgcaacaccttttatggcctagcctcataagtcacatgtcgtctcttccacagtaccctattgatcagttctgtgtcaatgtaaaggagtactaaagaaaaatacaaatattagaagacaaaagtcattgaagtccatcttggagggtgcctatcacaaattaatatctggaataatttttaaaataatatgtatgtacatatgttgtgagttctgtcatctgctttatgagttttcttctaactctgaattatgttgtttatacctatctatttcttaatgtctgttaacatttgtcaatataaaaagttattgttttgatctgtcctttgagcaagtatttctggtgtgttttgttatgtataaaaatgttttttttgttcagtagtctattttcttttatgacaattgttataacatttgacattaatatttttctattacttatttttatattgtgagttcctattacttattttatatagtgagtatttattgcctgttttgagattccactcttctctggtgcattagatgtcctattgcagccccgtgctctcttaaaaacagagatggttactatgcacataaaatggctgttggttgtctttaccacttgtgctttggagctcaggaggttgacttgtcacttaaattttttttttaataagttgtcagtaggtttttagtatttctatttagttgtcctctttgtttttatattgatagttaaaggtatccaaagctatgctgccaccacctaccatttctaaaatctctttagtgatttcaatcttaatgtgaatgctgctgccattaataatttctcaaatgtgcctgaatatttattttacttttttagggttgataatcctatgtttgtgcatctgattacctggcctgtggactatgcttctatcaatgggcagtgagatgaaatatatgaaatatatggccctaagtgttcatctatactcaggcacacatgtgtacacacatgcatgcattttcttatattcaaaaatagactattctgattcttattaattagtgtaaaaaaatcaagtccaagatttttggacttgcacttttctgggcctttgtaatcttgaatcaatattgtaaaatctacagactaaaatttaaagttaagactaccaatgcatacaatgcacaacagaaggtgaaagggaaaagaaaggaaagcgaaactggttttaaaaatacaactacatattttgacatgcaactgaatatgcattttagctaaatgctggatggcttaatgttaaaattaatagtcagctgaaccttgatatttccatcttaaaattaacttttagaatacagaaacaaatcttaaatattactgcaaatataaatattattaaacttttcatattgaaattttagtggtgaaattttgtaagtttgaaattatggtgcaaaaacaataattgctctgctgtcaactactagattacttctaaaatcattgtactgcctatttgtgattctaaatagatgttggctttcatgcttttctttaaggttacatcactttcttcaatagttttatttcatactatttttattctttaatatatttgaatcaaaaatataagattaggtatttatataagatatagttgacttcctcttttcttatttgaatgccctttatttatttctcctgcctgattgcccttgatagaaccgccaatactatgttgaacaggagtggtgagagagggcatccttgtctcacagtggtattcaagaggaatgcttccagtttgatattggctgtgggtttgtcatagatggctcttattattttgaggtatcttccttcaatacccagtttattgagagtttttaacatggagatatgttgaattttatcgaaggccttttctgcatctattgagataatcatgtgatttttgtctttagttctatttaggtgatgaatcacacttattcatttgcatatgttgaactagccttgcaccctggggatgaagcctacttgatcactgtgaataagctttttcatgggctgctggatttggtttgccagtattttgtcaaggatttttgcatcagtgttgatcaaggatattggcctgaagttttctttctttctttctttctttctttcttttgtatcaggatgatgctagcctcatagaatgagttgggttgtccttcctccttagttttttggaatagtttttataggcatggtagcaactcttctaccaaatcccaaactataaaaaccctagaagaaaacctaggcaataccattcagaacataggcatgggcaaagatttcatgatgaagatgccaaaagcaattgcaacaaaagcaaaaactgacatacggggtctaattaaactaaagagcttctgcacagcaaaagaaattatcaacagagtaaacagacaacccatagaatgggagaaaatttttgcaaactatgcacctgacaaaggtccaatatccagcatctgtaaggaacttaaacaaatttacaagacaaaaacaaacaaccctattaaaaagtgagcaaaggacataaacattgacattttgcttttattttatactcaccagatgttacgaatccctaataaggcttttcttaaaatactcatgtctttaacttaattaagtcattaaatatatatacatgtataatttaattttatgaaggctaatatatagaaattatttactgactgagattaagatatacacaaattttcattactttttcttattaattataccttatgaacatcttctagttcaaaataataaagtttttctaatattatgtaataaattatgtctttgtattaactgtcaaattatgtctccatttttgagctatatgagagttttttgtaattatttttattcataaaattaaacccatatatcaacctaattaattatgacaatattttgctactatgataatacatatatttttccttgacctaactgatggactttcaacatgtaaaatgtacaagaacagtatgtcaaggtaacatcatgaatatttatctatatgtgataatgaatatttaaatattaaaatatatatgaatattgattgaccaatttaaacaaatcttcctttcatctaaaaaattagcaataaattagacaaaatatatttttaaaatatagcttgaagacatgagataattagaaaagtggtgacaaattaatatcgaagagagaaacttaaagatgtaattcctgaattttatggctactttttccctagggttaacttttggctctagaagaaatgagaagaacgtaagaagctgaacagtacttttgatggtttctcaagatgtacaaacaaaaattggagccctggatccaccaagcttgggttggaggcctagtgaacctcctacatcttagatttgtattataaatggttaaattttagagcaagggtgaatcacaagtgtgaagtaagccctcacagcaactgaaggcaagttttgacttgtcttaaacactgaaattggattatgttgatccttgattgattatatccttagtcatttttcataagcaaattaaatctgatctggaggaaattactatcattctaggtctcaaattattttaatagtctttcaaataaattttctggtattcacaatcaaaagaacagacacatgaagagttctgtgagtagaattgtgtttcccaaaagacatgttgaagttcttgctcctggtaactgtgaacgtgatcttatttggaaacaaagcctttgcagatgtaatgaagttaagattagatcattgctagtttgagtagactgtaatccaataagaatggtgtcttcataaaaagataaaagacacagacttaaacaggggaatgccacatgacaacagaggtagagattgaaattatgtatctgtagttcaacgaatgccaaggaaacaggaacataaaacaaatacaggagaaataatacacaatggaatcagacccacaggactcatgttaaaatcattattcctatatgtctggtaaagatggcatttgtgaatttactgttgagtcttcagctcttcttcagcataaaccgatgatagttaaaacatgaaaagagaacatttaaaattaagataaatatcttcatggaccaaaaagtacatggaaagaaagtggtgaccagaagataaactatagtattggtcacatcaaagtccaaaaatagcgaaagggggctgaggctgtgagtatgactcctagagaaattaccagaaaagaacaacaaaaatacctggcacaaagtgggggtcctgagtcaggccaactgcttaaagcaggggatggagtgggggtccctgtcaaccactgcctgtggctgcagtttatataaagatctctgccaataaaggcagaggacaaagagcctctgaatagatcctgaaacaagctgctttctacttatttttccccacagagtcacatacaagatttacatgtaaatagtagtgacagagggtcttgtgattttgtggacattaccacaaaatcactagacctggaaagtaagctgagagagagaatgaatgagagaacctcaaaattcatgaagaatacggagattgctctcaagccaccaaaatcacttttcttcttgcatacaatgtcagaaagcacatccaagcttctttggacgttagataaaacacatgactatatatttttgtgtagaatgtaaacagcaatgcaatatgctgcttcccattttgacctactaaataaatcttatgaattatcctctatacctctatacttttttccttgactaggatggctaatacccaggacaactctgaaagccatatactgaaaatatgacaggcataattcaatgattccccacatgattttctgcccccttgtgttgacccagtgattcaatcaaatgtcagtataggtgctgctgtgaagagcttttaccaatgtaattagggcactacatcagttgaccttaagacagaaagattatctttggtcagtctgacctaatcagatgaaaccttaaaaagaattgggttcttaatggagatttgaagtttgagaggaatttgacctgagagatattatcagttgctggctttgaagagggagggggcaagaaatgaaggtggcctctgtgagctgacaaagacctggctgacagccagcaaatactggaatctcagttcctcagcatggaagagaattctgccatcctcctgaatgagcttggaagtaaaatccctagagcctccagaaagaaacacagccaggccaacaccttgattctctcattggaaaacaaagagcagagaatttagtcacgttgtatctccacttcggacctccagatctctgagttaaaaaatgggtgttattttaagccagtaagtgtgtgctagtttgttatgcagcaatagaaaacaaatacagaagatggcagggccactgtcactctgtgtgtgaataatccctatggaggagagccatcctaactgagatgaacaccctttcttgactactatgcaagtctgaaataaacaaattgttaaactactgaaatactgagtctatttttttaccagcctactttaccctaatgaatacactgaatgatagaaacgaattatgccatttatttaacatttacatatgagcaaaacagtagtatccattttgaacgaactaatacacatttgaatactcacataagcatgggccagaaagagataccttcacctcttttgaacaggtcttagagagagacaccacttccgtggatggcatcctggggccaaatctaggggagtgtatttagatataatctaatgggaatgagagttatgtaacaagttagtttgaaaggaagggtgatataagatggataaagtatacaaaaggggctatggtgtggttttaattgttagtaatacctggagtaaaaatggcaaaatgttaaaattcattaaagcatggaactttttcatatatttgaaatagtttataataaagcgtgattataaactacatgataatttatctcttatcacacatgcacacatgtatgggaatttaatttatgacaagggtggcactattaatatccatataacaatgaacacatggccgctattagcagtggggtataatttgtgccactggcattattactctgagtaaaatttttgatgttagtttttactttctcattacccatcatacagtaatgaagtggcccctaggagaggaaacttgaattctgaaagtgagctttagccaggcacaatcgcacacacctgtagtctcagttattcgggaggcggaagcagggaggatcccttgaggccaggagtttgaggttgcagtgagctatgatcaagccactgcacttcagccagagtgacagcaaaaattggaggtaaaacatgtcgaaaaaggatctcttggccttgttctgtgcaggagacatgcaagggaagaagaaaagacacacacacatgacacctttaagggtaaactctgttctgttctcccacacagaacaggctttcaaggagtcctgaagtttcttcagggaaattcagggcaggaaactctaaagcataccttttcctaagctagcaatacataagccagaaagcatatggttacacttatattctttatttatttttgtactttttttcttttttttttttttttgagatggagtctcgctctgtcacccagggtcgagtgcagtggcacctccgcctcccggattcaagtgattctcctgcctcagcctaccaagtagctggggttagaggcacctgccacaaggcttggctaattttttttttttttttttttttgtatttttagtagagacagggtttcaccatattggtcaggctggtcttgaactcctgacctcatgatccacccacttcatcctcccaaagtgctgggattacaggtgtgagccaccgtgcccggccctgtccttctaaatctttagtaggtttttaagtcttatttaaaagtcttgtctcttggctgggcacagtggctcatgcctgtaatctcaccactttggaaggctaaggaaggaggactgcttgagcccagaagttcaagaccagcctaggccacataggccctgtctctccattttttttttttttttttaattagctgggcatggtggttcgtgcatgtagtcccaactattggggaagctgaggctggaggattgcttgagtcggggaggtcaagacttcagtgatctgtgattacaccactgcactccagcctgggctacagagtaagaatctgtctcaaaataagataaaataaaataaaataaaaatcttgtctcaactatgctaagtgacattaaaaagttgtttgcatattcttggtgacagtggtcattaataatatatttttaagcgaaaatgaaactggggacacaggaaaaagctgcaactatcagctgtttgaccccacatggagagtctcattctatggtcaagctaagagaacatagttttacagtagtgtttcttaaatgctgttaagcttattttctagagatacaattctgatgctgtccccaccctctaatgatcagcatccaaactattattacattaattgattacaagggtggcactattaatatccatataacaatgaatacatggccactattagcagtggggtataatttgtgccactggcattattactctgagcaaaatttttttttattgatacttgaatttcatcacagtctctcaccttttttccctatccacactccaacaactatctttgaagtagtttccattttcatctcattacttttctttttcttttagattcatgggggtacatgtgaaactctgttacaataatatattgcacggtaatgacatataggtttctactgaccctgtcacccagatagtgaacttagtaccctactacaaagtttttcagcccttgccttcctccactttccccacttttggagtctccactgtctgttgttcccatctttatgtccctgtgtactcaacgtttagctcacccttgtaagtgagaacacgcagtgttttgttttctgtctctgcattaatatgcttaggataatggcctccagccgcacccatgttgatgcaaaggacatgatttcattcttttaagtagctgtgtaatattcaatggaatgtatgtactatattttctttatccattctaccactgatgggcatctaggttgattccatgtctttgctattgtattaataaatagtgctgcaataaacatatcagtacaagtgtctttgtggtagagaattatttaactttgaggatatatccagtaatgagattgctgggttgaatggtgatttctcatcacattattttctgtttttcagaggcaccttcctacatacattaccagaaaaacaaagcaaaacaaaacctactgcatatagttattcttcctttgttctacttgctctctacataaggagggtatttgaaacttcagacaccattttgctgctatgaggaagcaagtatgaagatgaaaacttggctaaagctatggctctcaacttctaacatgcataagaaaaacaactaggaatctgggctctgattcagtaggttagggtgaatttacccataaatttacacttccgacacacttctgatgatactgatgctgcttgcccatggaccacatatcgagtagtgctaggctaagatatggcagatagaaagagcctatgactctgtcccagaaagattgggctgctataacaaattaccatagattgggttgcttaaaccagaaacatttatttctcatgattctaaagacagacttcagagatccggatgccagaataattagtttctcggtgagggccctcttcctaattatttcctcacagggcctttccttggtgtgtgtacacacacacctacagatctcatgtgtttcttcctcaaacacctcatactcctggactgaagtgatcctcctcctccacctcctccttccccttcctttttgagacagggtctctcgctcccatcgcacaggctggagtgcagtggcataatcacggctcactgaagtcctgacttcctgagctcaggtgattctccagcctcaggctcccaagtagctgggaccaagaggcgtgcgctaccacgcctggctaatttttgtattttttgtggaaatgggttttcaccatgttgcccaggctggtcttgaactccagggctcaagagatctgctcaccttgacctcccaaggtgctgggatggcaggtgtgagccactgcacctggcctcttccttttttgaggacatcagtcccatcataggggctccacccacatgatgtcatctaaaccgagttacctcccaaaggctccatttccaaataccatcactgggattaggaattgggatttcaacatataagttttgggggaacataaacatttagttcatcgctgacaacattgcagagcagttgaattaatggcagcaatagctgtattctggaatttttcttatgtgagaaaaataaaccaatagttgtttaacccacacttattgtttctttcagccagtcttattctgactgttaaaaatcatcattattatcaaaatcttcagcattattatcatgctagtcattattacacagtgtgctgggcagtatatgcattctttagatataattatttatgcctaggtcaatacccagaagagtttttcctaggttttcttctagaatttttatggtttaaggtcttagatttaagtttttaatccatctcgaggtaatttttgtatatggttagagatagggattcagtttcattcttctacatgtggctatcctgttttcccagagacactgggaatgcttataaactgctggtgggaatataaactagtactacctctgtggaaaatagcatggagatttcccaactaaaagtatatctacaattcgatccagcaataccactagtggatatctacccaaaggatatctataaagaagtcattatatcaaaaagacgcctgcacacctatgtttatcacagcacaattcaaaattgcaaagacatgaaatcaacctaaatgcccatctactgatgagtagataaagaaaatgtggtgtgtatatatgtatacatatgcatatgtacacaaacacagacacacacacatacatcatggaatactaagccataaaaaagaatgaaatcatgtcttttgcagcaacttggatagaactagaggcggttatcctaaatgaagtaactcagagacggaaaaccaaaagaggggatgtagggaggaggtgaggggtgaaaaaaatcacctattgggtataatacacactatttgggcaaaagcccagacttcgctatgcaattcatgtaaccaaaaacctcttggaccactataactattcaaataaaaaataatttaaaaattatataattttctgtccaggtgtggtgactcatgcctgtaatgccagcactttgggaggctgaggcaaagtggattgcatgaggtcaggagttttgagaccagcctggtgaacatggtgaaacactatctgtactaaaaagacaaaaatactaaaaatacaaaaattagctgggcgtggtggtgggcacctgtagttccagctactcgggaggctgagggaggagaatcgcttgaacctgaaaggtggagtttgcagtgagctgagacagtgccactttactccagcctgggtgacaaagcaagattctatctcaaaataaataaataaataaataaataaatattttaaaaaattaaaaagttaaaaaatatataattttttatcaacccttccagcaattctgtgaaatgcatatagttttctctatgatagaagaaagtaagaaacagtttaaatggtttagcccaggttatatttagaacgctgctctgcaagccaaattcactcaaattcccttgttcttaacctgtgttataaaccacctcctacatggaacatatatttaacaaaatttggtggatgatttacattctcttgcatcattctaatcagagactttttgtcttaccatcttacatgacttactactttctctaacattgtttattcatttccacataaacacttaatgctatgagtaagtttccatactgaactctgaggtaggccatcccagtcgttaaggagatcacaagctaataataagagactcagacaaaaaaaaaaatcccttcttataatacaacttgtaactattacagtggtattacaagaaaataaattctacaattttggataggtatttatacacaagtcattttccctactagggtttagcttggtaagattagagtctgtgtttttctgattttggcatttttagcaactgcagattatatgaatgagaagttttctaaaaatttgaattaatttatccccccatagcagcatattttgcacacatgcatactcacatacacacattcggctttatacataaagagggtatttccattgtttttcgataaactttttattgaaaggcaaaaatacagagattattttgcagcttaaaaagaagagaaattaataaaatatcaatgaaagcttaagttatcatgtattgagcatgtaatatttgtcacactacattctttacatgtatatttaaaataattacaacaatccagaaatgtagaatcatgttattttaatgacaaaaatatctgaagctcagaataaataacccttgtaagtcaagggtcaggctgttttgggaaataaaattgttctgttgtctatggctggtttcactctacaatggcagaaatgagtgcttgtgacaaagcccatatggtccataaagcctaaaatatgtattatctggctctttctagaaaaaacatttctaagccctgaagttgcttccgtttattcagtagcaagtcataaagactaagtgtaagcagtctgcctgtctctacacaccatttagataggctttggaaacctcagactctgattctcagtctcaatttgactaggtgctagctgtgaaaccatgggaaacttctcaaacctctcttccactttgcgccttcatctgtaaaatggagataatagtagcatacgtctgatggtgttgttataaaaattaaatatgctgatttacataaaaccctagtcacaagacttgttaccttgtaattgcttaggatgtgtatgaacttactacctctgttgttgccaccattacttttaccttcatgatactatcatttttactattacaatgaccactctaaaacaaggcattcctataatcccatggttatttttattgcaagttactgttaaggccctatttcttatttcctatttttgtgctttttatatttctttccaccattttagaaatggttgtggcattaccatgatatttttcttactcgtaatgaggtagcgatgctcttgttatagatcaaaaccaagacttgtatcaaggtcttggcagaaaatgtgatttttgtatatgtgtgcctatgtatggcagggtatctagcatagaacaggggctgaatgattacagaattaatgttgaagaattagacaataggtcacatatgaaaactaaggacagatacaaaacactacttaattttctagggcaataatagggagtagatattttgtctttgagagagaagcgataaaaactacttgaatctgatatttcaagtcttagtaactattcctttattctctgcctatttacatattgtacttgttatctgttagccagcagcccactttttttttggcatacacttggcactcccttacattaaaatagctacggggattttccatttaaattattttccaccccagtgtcattttggggaactcgaatctttctgtaatgaagtattcaactccaagtaagacagttggcctgcactgtgcaaagcaagctcacttataagaatcttgccgggacaaaaaggagagttaggaagtctcttgtgttttcccagtgcttttgaaattaatagctggcacattttgaatcacagcacaagagcaacaaaacagaagatctattttaatagacttgaatctatacttagaaggacacagtgagagcaaggagaaaatgaatttgacctttatttgctctaaaaggatctttatgtaggtaaaggaagctgtgcaacaaaataacaaagttgttgcccatggtactgtaagtacaaacatctttccttctcagggaagagagatattttgctggatttgaaaaacaacagaaaacaaagcatttattgacaggcagtgaggtctgattgaaaaatgtaaatattaattcatctgaacacttaactaattaggaaactagagagaaattcagtggagttttgaaaaaggtagcaggtcaatggtgaagataacatggtataaagagtaagtgaaagtaaatttccttcctcagaaaactaacacccttgatccacttatttgtgatttttttttgttgttgtttgtttgtttgtttgggacgagtcttgctctgttgcccaggctggagtgcagtggcatgatctcagctcactgcaacctccacctcccaggttcaagcgattctcctgtctcagcctcccgagtagcttggactacaggcgcatgccaccacacctggctagtttttgaatttttagtacagacagggtttcaccatattggacaggctggtcttgaactcctgacctcatggtccgcccacctcggcctcccaaagtcctgggattacaggtgtgagccactgcaccaggccaacacttatttgttaatttaaacatgcattatgtgttagatgctgaggaatctgataaatagtgcttattttaaagttgattttagtttagtgagacgtgcaagtaaacatacaattacatttgataaatgcagtggtagagttataccaggatactgtgtgatatgtttggctgtgtccccacccaaatctcatcataaactgtagttcccatgatccccacgtgtcatgggaggacccagtggtaggtaattgaatcatggggtcagttacttccatgctgttctcgtgatagtgagttgtcaggagatctaaaggttttaaaaggggctttgcccccactttgttcttcacttctccttgttgccaacatgtgaagaaggacatgttttcttccccttctgccatgattgtaagtttcctgaggcctccccagttatgctgaactgtgagtcaaacctctttcctttataaattacccagtctagggtatgtctttattagcagcctgataatggatgaacacagtgttaagtcacagtgaagtgggatgcaggatgtggtttacagtgatacatgagttgctgtaaaagctttgctcattttgaaagcaatataatcctagcttcataaaataagttgggaagtgttaatttttcacttttctggaaaagattgtgaagaatcagcattatttcctacttaaatatttagtagaattaaccagtgaaagatttttaactgtagatttaaattctttaatagatgtacggttatttaactagtgcatttttttttcctagaattagtttgtgtctttgaaggaatatgttctttttttctgtattcaaatttcttggcattaagatgtttatttgatgtttccttatcacattttaatgtccattgtagtaatatcttctttattactgataatgttgtatcccatttttttctttgtcattcttgctagaagataatgaatatattgacttttattcagagaagcagcttttagcttcattgattttttccattgctgtttgattccccatttcattaatttttaaatctttattattcctttctttcttcatgtctttgggataatttgatcatctttccttggattcttaggacagaatttgaggtcttttgtttgaaatcttacttattttttctaatatacatttaatgctatatatttttctttaaacactgcttcaggtaaattccacagattttgatatgtttcattttcattttcattggattcaaaatatcttctagtttccactgaattttcttatgttatccttaagttgtttaaaaatattttgtttaatttgcaagtatttggaggattattctgatattatttactatactgttattgagtttcagttagtttgatgtagtcaaagaacatatttatatgatttgaatccttttatatttatttaaactttttatgacaaaaatggttatctttgtaagtgttctgtatatgctttaaaagaaggtacattctgctatagttaaatggagcgttctaaaatatcaaatcggtcaaattggttgacagaattgttcagttattctgtatctttactgattttctctgaactttctttaaaaatgctattttttctacaaaactcctttaatttttcagagtgttaaatatccaactaaaattgcaagtttttctaaatctactttctattttcttaacaaatgtattttgtatagtttgtactctaccattgaccgcatacacattcggagtttttttatttttatttttatttattttttttttttgagacggagtcaaactgcaactcccaggctagagtgcaatggcgcgatctcggctcactgcaacctccgcctcccaggttcaagctattctcctgccccagcctcccaagtatctgagactacaggtgtgtgccatcatgaccagctactttttgtatttttagtagagatggagtttccccatatggccaggctagccttgaactcctgacctcaagtgatctgcccacctcggcatcccaaagtgctgggattacaggtgtgagccactgcgcccagcgacatttggagtttttatatcaccttgatgaactgatccctttattattaggaagtattcttctttatcctagattataattccttgttctaatatctgattgtctagagttaacgtatgccctcaagctttcttttaatcagtgtttaaaatagtagctgtttttcgatccttttactttctacacacaaatacacagattgtgtgcataaagtgtgtatgcataaatatatataatatagataatatgtatattgtatatattttttctaacgtgagtttatatcctttcaggtctttattttttttaattcaatgtgacaactcttgactttgaattcgagtgcttagactgtttacatttaaagtaattattgttatggctgaatgtgaatctagcaccatacagtttactttatatattttctttcaacacttttttttcttttttgctttttccctgcttttgatttcactttttatccatcattggcttactactaataactctttgagtgttttgttttattgtggttctacagtttacaataaacattataccactccatttacagtgcaagaattaaaccagtatgtcttcattcttcactctttgatttctttgtgttactatcgtcatacattccaatggtaatttttacatttttaaatatatatttattaattttcccatcaggctgctagctattcatttgttgttaatttataatttttatgttatgagaaggtgctctacacttctctttttcagaattctagaattatggtttgttttctactttaattttaaatttatttctaggagataacaaagatattacatgtctttagaaaggcttatttctcacattcctttgactgtttcagatttaacacaaatagcatctctaagaggtagttagaaaggttggtcgtagttttaaatatgtctgtatttatatatcccaaacaaagagcatttggggagatatttaagtatattttctgttaatctttttttttttttttttttttctgagacagagtcttcctctgttgcccaggctggactgcagtggcacaatctcagctcaccgcaacatctgcctcccgggttaaagcaattctcctgccttagcctttcaagtagctgggattacaggtgcctgccacctcgcctggctaatttttgtattttcagtagagacagggttttgccaagttggccaggctggtgtcagacttctgacctcaaatgatccacctgcctcggcctcctaaagcgctgggattacaggtgtgattcaccattcccagcctattttctgttaatctctatgtgaatagtattaacatgatgaaatgagatgtatatgtcaaagttatacctaagctattaacacactctatagagtgataattatgcaaataatgtaagttagttgtaataatgttggtataacagtagactgagaataattataaggaagattgctaggtaatatcctttttaaacattttttctgtggatgtaacaaacaaaaattccaccttttgataatttggaatatgttactgaagaggattctgcttaaatttatcttttgactcttaattagctcacgtttaattaacttaatcaacatttatgtatctgctgttctatgaaatgtatgttgagtgaaggggttgcaatgagaagaaattagagctccgtggatctgaattgagaggatgcatattgcagcatcaacatggtctttcagagatgctaagggagttaaaattaacataataccacagaagcatgatcaaagacttatttgaatgaaaaaatacacaattgttacagatatgctaatgttgactttccaatatactaaaattgattaacactgaaaaacccctccttttatagaatgtaacaaaatgtgaattgaattgtgtctttttgtttgtttggtttggttttgacacagtgacattatgccaacattttttgaggccagtattttgttttcagtttctccaaagtgtgctctacacattatgatgtaatgaatggcaaggttacataagggagataaattatcttacctccctgacttcctttttctgaattactaagatgcagtgaaaatcttgatttttctttttggatgttgtttcaaatgtgaatatattaggcttcatgggtttttatccaagatatgtgttccataccccaattcactcaaaataaaagttagagtacaacccgaaatggaaatatgactatcgcagcactcttaggaaatgctaatgtcaaaagatttagggaacttctaaaaacatcagaaatgtcctactttcaaagcttcccttaagtctgtcctctttagaaattgtgagggatagcattaggagatatacctaatgctaaatgatgagttaatgggtgcaacccaccaacatggcacatgtatacatatgtaacaaacctgcacattgtgtacatgtaccctaaaacttaaagtataataataataaaattgaattaaaaaaaaaagaaattgtgaagttatttcctgtatcctgaaggcctgggttggaatgttctagtcccttcctagccctccagatagcaagctctgtgtctttgaggcagatggacacactctatttttattctagggccagaggtatagatcgcagtaggtacctgaataaataaaatttgtagcatctattcctctggaaaattaaagtactgctcagaaccagttcttgaaaaatgcattacttgatctatttctgtaggatgcactttctttcgacagaagtttatctatttgacttgtgagttggcttctagtgagctggcttctgactctcaatgctaatacctggttcttttgcaataggtgttttcagtcattatttcttttgatattaaaccaatggggctttgtgagatgccaaataattttttgtaagcatcacagtcctggtttccaaagcagaaggtatttagaatgaatgtcaaatttgttcatttgctcattcactgaatatttgctcaacaaatattttttaattccaatatcatgctgataattcttcttgctgaaaatccctgcctgaaattaattgccagatgaatgtagagaaacatacatatttggaaaaacataataaagagatccacagaggactcataatgaataccgagaataaggatcagggtggtagaaatgagaaggagattttgcttgaagtgagacataaacttctaattggtttcaaggtttatactttcaatcacatcatttagcaaaaaggagtgagctcagcattttctaacctgtagacaagatgaaaataatttgtgccgaatatgtagttttttctttcctctttccaggttttaaaaaaagatagaaataaaagaaagaatagaaaattaggctagacatcttagtagaagcatgagcctcttttgtagatttagtaaaaccttattaattcttattatactcaaaatgaaattaagataattttataaagatcttagctgaattacacattaacacagaaaaaaataattgctaagaaaattgatatggaaaattcttcagtatgtaataactcttttgaaatatacttagaatatctctttacatattataattttgaatagaataaagtaataaatccatagtttggagaagattcctctgatcatggtaaatatggaaaaagtgataagagatgacagaaaacagcaacagataccagttaagagagaattataatggctgggcttgagtcaaggactatacaaagatgatgacagaatggtgggggtggggggcgaagcatatcttcaagctcttttatgaagaataaaaaggtagactagagtttgtgtgattaagtagcttctaaaacgctccccaggatttcagccatatagtattcacaatcctgtatattcccctcctgtcgagtttgggctgaacctagtgactagtttcaaaagaataaaataggatagaattgctctaaagatagcaaatgggatgggatgtcatactgaggttaggttataaaagactgacttttgctttgatctctctgtcttgtctcatttactcactctgatgaagcaagctgctgtgatacgagctgctgtaaaaacggaggcctccagaccaacagccagggagtaggtgggttctgccaacaactacatgcgtgagtgtggaaacagatccatccccacttgagccttgggaagacttcagtcctagctggcaccatcattcagcctgtgaggaaccccgagccaagaatacagctaagctataattgtattcctgaccaacaggaattgtaagataatatagctgctgttttaagttattaagttttggggtaattggttacgtaataattgataactaatacagtctaattcacttctccctccgtgtctctaatacccagaggcgatctaatcaggctacttgactgggagaagtcaaaacaaagcaacaataataaacagtaaatatcacaagtattactttattattttgttactttcctgtaatctagtatgtatttatgccatttgattattaaaaattatctgggccattatttccacttctgggaaggaatcacagaagactaatccaagagaaaattaaaattatatgcacaaatttgctcatactatagtcacctataattttagaaaatgggaagctattggttattcatctgtgtaagaatagttaagtatgttatatgatgcagctactcaagggaacatgacccaaaattgactttgaaggctaaatagaaataaattaaataatttatgtagtcttgaagtgaaaggtgcagaacagaaaatgatacatctgcattaaattatgtctgctcaaagtacaaagatcataccagaaatgttaaaatgattaatttttagtagagaagtatcctagagagataatagggaaaccatgacaaaattttgaaagacttgtctttgaatattgcatcaagaattaattagctgtgtgattgtgagcaagcatttaatgccttgtcttgacaaatatgctaaagacataattatattaccgattattgttagaatgaaatgaggagtgtgtataaagtaccttatacaatgttggcacaatggcacaatgttgatgtttgttgccttttatttctactgttgttaatgtatatagacatctaaaaattatatattaaatttcttgctttatacctggtattgcttgaaaggagtgatttgaacattttgttgccaccataaaaactgattatactccatgctctgttgtgttgtactattttgtttgcgaccattgtgtaactattttgggatgtcactagcagaatatcttttaaagtactctagttcctgcaaatctttgtagtgtagagtttgaagttcatatttcctccaagttttgtaaaatatagtcatattggttagagtaaaattccatcacttgactttaagtacaaatgataagtttttttatttgaagttggtttttctagggaaaagaatttttcagaatttccttggtttgctgaactttctatatatatatatatatatatatatatatatatatatatatatatatatatataaaggttatttttgttttactccactctccccacccagaaagtctattgcttttgtgtgatactcttctgttactttctaaaagtctgcctgtgaccatatcatttgatattcacttaaataatttatatacttaaaaactctctgggtgatcaatgtattagactgatatagcaagaacaagctgttttccttgttattaaagccacatatgtttgcccattttttcaaatgtgaaattgaacatgacaaaaatgcatgagcattttcctgggtaataccgctctggtaattcagcaggtctataggtagatggcataattttaacatagcatttctaaaaattcttatacaccatctttggttacatgaaacactttatgaaagtatgttatctgtagagattctggaaatattaactcttcatcagattttgcttaaggtttcagtattcttaacccacttcatttcttattttttgtttgttacatggatataaccaaatgatttccctttctaaaatactttctcattagaaagctaaatgtagagttctgaataagtgtgctagaataaataaattaatgatatcaattgttaaaaatggtatagtttctttcactctcagataaattactctatatcaatcgcctctgtgtttgtgtgcagaggagagactcacattagtggccactggaccagtgggaggaagagcttatgggaagagacttctttggctcatctcatgttacatcttggaggtaagtgactagtctcgaaaatattagactagattgtccctagcctgatttaacacctttaaattatgaatgaaagaatggaggtctggtatattgaataccttttctaggttccatggccatctaatggtagagacgagaatgattgtgcaggaagtaacttctttcatactcagttcagagtatgtgttcacatagaaaattatgggatttgcctctgagattgaagaaacagtatactgaatgtcatttggagggttttgaagtgtagaaaaagagaaatatatctctttggtttcctttcagtctgatacacaataatgttttatttttgaatgtcattttatgatttacaaagtgctttcatgggcattctattatttaataataatcctgtgtgagccagacatttttacttctatttcacagtgaagaaattttggttcagaatagttaagagacctttcaatagtcacacattgtgaaggaaagaaattgagagagattgaaagagaaaaagagagagctagaacaaactcccagcataaacagaattagtccatcacccccaaaatgaaattataggacatttaatgctctgcaaaccatacgtagcacagacaatttctgtttaccaaatatttatgagcttccctatattttctaggactcttttagttagatggagctactttactgatagataatagttctaggtaatttgctataaacagaagttctgtgggccgaatccctctatgctggcgcgcaaccctcattcctctctttccctgccacagtgacctcaaaggccccatcccagaaggcacagccacaaaaaacgtggcctccaccagcatggatccctgaatgtaatgggatcagagcctcctgcccacacctggtaagtatatatcatgagtaataaatcaaccttttgatattaagccactaagatttcagacgtaatttttattgcagcatgaagtaaagtatcttttaaaagtaatcttttaaatattactattttaaaggagcaagaaaattacattttttccactatcttaagatgtataaaacgtgttgctttctgtagcagattttttaaaagacaatttagtcaacaaatacttttgtctttaaatcctgacatgcacaatagcacaagctcagtggctggtcaccactccagcactactaaatgatggcaagaagaccacttccaaagaaggagggacagggacagcttcatggttacgtggctagtgggtttcacactcagaagctcctgtgattagagtttaatgcactgcacttactgtcttaataatcttaatagatttatctttgaattttgttttgtaagcaaaatctgatgggacaatggcacttgagcctggagcttgccttggctcacatggtattgcctccatctctctctccaggatgaattctcagctgcctgctcctcttatcctgtgctctagcctgcctggccccccttttcccaatctggtcttgccactttctgccacaggtgggaacctgatagtagatgggagattagggataggcacaagtgccctgtggtatccagaggcaagagtagagcatagtgatgacaatccctgccctgggctgacaactcagcagtgaataggtggagaccaagggcatccaacgctcaggttgcaatatccttggtaattgcccattgcacagcaggctggggaagtgggcctgtgggaagaggagtcaccgtctggactcctcagatgctgtcctggctaatgcatggtatgtagtccaggcagctgttaagcagagcttgtgcacacatggcctgtgtcatttggcaaaaccctaggcacatgtgagggtctggctcactccatgggtgtccccgtgttaaaggatgctttcctggcctgcttcattcctggaagtaacttctattcctccttccaactttccttaatctggcttgtgtttttctcttctactagctccagggactctctggggataagccatgtaataagaattgtgtaattacggtgcttcagcatacaacttaatattctgatatctgcgtttaaaagtggacttgcataatataaacatggatgataagatctaataatttaaaattttattttttctttacttagaattaaatagcaaatatagaacatcatgaagaaacacaagagagagacaataaaggaaaggaaaaggctttatatttcaacacaccaaatgacaagtttttattgatttttgaatgaggggcttagcatttttattttgcaatgggtcctgaaaattatttagcacatcttgaggaagaaccagcattgaaaaaaaaaaaaaaaaaaaaaaaaaaaaaaaatgaaaaccctgtagaatgtgaataaatcacccaaaagtgagatatctttcaataagaatctcctgtggtaaactcctgatgccttaagatgctgtttagttgtccagatcgctttaaaaatcacaacaacctgcagctggcctcaccaagctgcctctgaagtctttctgactttgaattgggtccagctatacacaaaaggcttacatttcttccttaactataacgctaaaataaaacatacaaggtctaaaaaagaattgctgaatgggtttatcagatccccacagcagtgggaagtcacaaagaaagacaaaacagtcttttgcttcatacttgcttttgaaattgcattccctccagttcctctgtgcttcttttgcaaagggcagactttatttctgccaaaatctttgcaacagagccaacagaatttatctcaagcttggcagccaatatacattatccacaggtttctggctaaactattaaaattaatcagttggcaagctttcattttagcagctctaataaacaagagaagcagattcccagggggtggaaatatcagtaaatatagcagctttaaaaggaagaaattcttcaaaatgtccgaagatggactcaagctttagtcaaatggacctaaactacagttacagtatgggcaaaaccattcatttttattaaggcatttttcagtgcaagaggaatcaagtccattctacacataggatctcaaacaaactttcttcaggttgcatgatacaatgttctatttgaggggtggtagtgtaaaagagtctctgcagatacagtttgccttgtggatgctaaaatttcagaagtaggggtttcaagtaataggcttgactctggatatttagaagacatatgtggcaggaatagaaatattcaccaaatattccacatgttctgtatgttttctagtactcatgcagttaggcagagtctcacaatttattctaagcttgtgacatgcattccatttaggctaaagcatagaagtatgagttcccgggcttctcttcccctctatgagtgacacgttgaattgcagatggtgcagctctgctcagtgtagattcctgagaccctatgtggagtaagtcccatgccaaactgtgttgggcctgcagcatattcattaggccagcccatgttgattggaaaatgaacacttgttgcattaaggcactggcatttagaggttaatttgtaatgcactatatctagcgtgtcctaattaataataagattagtaccaatgctatgatgtggccacagaaaaatttaaatttaaaatttaaaatgatggaggtcaatgacactaataaaaaagacaggcaataacaaaacattttgtaatgtttgtcatgcaatggcaaaacatttggcaaaatgtcctccacagtaagttagatgggaaataacatacctgataaaccacagctctgggggaaaggaatggaaaacaagatgatagtagtgtttatttgtggtcttttttttttgcatttagtttgacattttacaaagaaagagataaactcatgaaggaattgaccatttgcaagtaaaaatggaagagaatagaaaaattccaaaaatgtatgaacttgtaatgttgaaaaataaatttgaatgacaatatattggcctttagaaaaaattagattaatggcatgaccttcagaacagttgataaaaatccttcagtggattaatgtaccacatgacaaacagcaaattaaggatataatgcacagaaaagcatatcgattacttaaatatgtcagggcaaaagtaacattaaaaatttctttctatgtctctattctatgtgcccaccattaattgcagacaaaagttttggtgtcaagaaggcaaatagcaaacttggaccaatttttcaaaagaactgtatgttatggggggaggctggcagtactaattactttcatttaaaaatgacaggcaaataaatataaagtctactaaacttttgagacagtgacaaagaaataataaacttggactagaacatcttgggtcacaatcttctatggataaggtgtggattaccccaatgatcacttttgtaggatatgtggcaaggaacaatgaaccttccagaccagtgaacccagtgccagggagaacaatgaataagaggactcctcctacaaagcagaatctagaccaaatataaaattcacctctactcttaggcttgctgttctatatgatgggtgcccagtcgcattgcagatttggacctataactgatgcatggctccagctttcatcagacactgattattgtgcaccctgtattgggtgcaaaactggaagagtgaaattttatgctatattttattaatagactttcataccaaaaatttcaaccacctttggtgtagaggctattgtacataccagtgaccctaggttttgaggtgacacagtgactggctaagacttttgtgtcctcccaatgggagattgtgagtgtgttatagatggagaagaaaagagtagagagatttttttttttatttccacaagaatgaagtatagctgagattatgataatcaaaatattccaaatgctgctctatattccgagcctctatgaaaaaagaaggggtaacgtggctaattatgcaataaagaacatgtcagatccaagtgtctcaagtctctcttcctatgctatagtgactagtgacattttcagtggtggaaatttccatcagctgatgctgttgaggagtcatgtgaagcagttttctaccccaactcccatatatagccatattcctcatgaaaaaaaaataaggcttggtttaattaaacaattgaaaattctgagttaatgtcttactgccacataatctgatttaacctaatacaagatgatatatggaatataatttcaaatgaatggaaaaatgtgagaatgaaaccagtgagtttctatgattacagaggaagttcatctccagtgaaagtgatgtggaaaagagtccaaaatttgtaatatggtagacctgatttgaatctactccctttttatatatatatatattttttattatattttaagttctagggtaccctttcatattattaattctgtggggttgaacgtgttatttaaactttttagccttaatttcttcacagataaagtggaaataaaacctaccttatagattattataaatattaatgagaaaatgttatataaggggtcttttactatgcaatggcaatataagaccagctagttctccttttttcccagccctaccattattggatggacatggtaaaaatgaaaataaaagtcatcaagtgaagtatgggattgccacagaaactcaactgcatttcagagaaatgcaactaactgaacatacaaagctcatccaacctcagaactcatcagtaaatggttaaaataagcatttattgctgagttctgaggttgggttgagctttgtgtatgtaatgttttagataggtaacagaaattcttgcagctgcccaaaactatcaactgtggtgccagattctagtgaaattaaaagtacataactttgcagcaatttttttaaaaagcaaaaataaaataagcaattaaaaactccaagtaggtcaaatagaatgagtcagtggctagaagattaagattaaaccatgaatttgtcagtgtatggaccatgaagtgagatcaaggctgagtctcttgtgtaaaactgcctgtgttcaagtcccagttcatccactaattttaagcaagtctctatacatctctagttcttagttttctgtatgtgaaatgagaatgattgcatctccttcatatgttggatgtgaggaataacaatacctgtaaagcaggtatcgtactgcctggcaggtactccgtaaatgttagtcttcattagtaatatgaccaccatcatcaacatcatcattattaatgttggatatggacaatttaaagggcaacttaaaactggggaggattgtaaggataaaaaaatggtaggataaaaaaagaatacgaatctggtagtgtttaggaaggtttgtaagccatctaaggtttagttctctgatcaagcattgcacactaaacacacaggtacacttccaatcttcattcctataagaagagttaatcaagttatagttgatcattgaacaacatggggttggggtcgcagaccttccattcagttgaaaatttatgtataactttgacttctccaaaactttattaatagcctactgttagccacaagccctactgataacataaacagttgattaacatatattttgtatggaatatttataatatatggcattcttacaatacagtaagatggagaagagaaaatgttattatataaatcataaggaagagaaaatatatttacatttattaagtgaaagtgaataatcataaaggtcttcatcctcattgtctttacgttgagttgggtaaggagaaggaagaaagagagaagttggttttgttatcttagggatggcagaagtagaagaattgtggggggtggaaatggagttaggagaggtgggcacacttgacttcaacttttgttgaaaaaaaatctgtgtataagtggactggtgagttcaaatctgtgttgtacaaaggtcaactgtgatagcacaaaaattgaaaattgaatattgacctttctaaggtattgagaaaactttctacagtcattgggtaaatgtagtcttctgagacagctactatgatgagctaatgataaccgaatgttatttattaattaaagatggatttcatttgttgatcaagcacttcacgtgtttaattatttaatcattttattttaacctagtgagtgaacactgtgccaggtgctggggatacatctgaaaaaagatatgacatttatcttgtccttcatggagctgaaaacaaaaattccaaaaagaatgaatcactctatgattctatcatttctattactgctcttctcaccttgttcactcatgatttctttgatttccatgacagcaacagctatcttttacctgaaggcagtgacaacatcttaatcatcctgataataattgcgctaaaatatagctggattaatatctatattttgttaaggcttgctgaatgaattaatgaatgaaacaaaattattctcagaataaccctacatatttacatccttaattttgttggaggaaaatatatacatacagaacttattttaatcatttactgatgagttctgaggttaggttgagcttcgtgtatataatgctttcaaaatttaaataaaattaatatttctttaggctgggataggtccaattttacttctcatagtatgtttcttgcctgtatgcaggtataggatgtctggatatctttccgatcttacagagagtcaaatgatttcataacttttgggttgtatatattataacaaggagattggcaaacctacactgaactctcacttttacttttaaattaaattccaaaaattggccttgcccatatacattgagagtttttcctttgagtatatgataacttcaacatatattcaagaatgctgtacaatcattccttcccctgagataccctcacctactttgggcaggaccagagctgtgctaagagtacagctcaggttctagagagatgtatctggagcacaaattcctatccaaggcaactgaagagagtaagtttggatacgcaatccaaagaagccagagtaatggatccaagttagctctctgagatcaagagctgagtacaacaaaatatcacctcataatatggagacccacgttctaatctgagctcgactatttataatctatgttatatgtaacaaatgacttagccacattgagaatcagtgttgtaccttgttgaatttgttaggacagaggctccctgtattagtcaacctactgtacccttccctggtgaatatacctacttactatagttcttctcttaaaactacatagatatttccattatagctgtgttttcatgttgtatttctaaatcaaacattgaaaccaacattgatatgtacaaccagtaagtacatgaaattgtatgtcctttctagaaaataatttgaaaatagctataaaaaaccctttaaagtatgtgtacctttgacccaatcatcttaattttaggaatctttcctcacagttgctatcaagagcttttttataccagtatttttactatagtagtatttataatttgaaaaagcaggtacaatttaaattttcaatagaggaaagatgtggatacatgacaggaaagtatacagccatcaaaattcatgttttcacataatatttgaaaatatgtggaaatattgacatataatattacaggaaaatagtttggtattacagatattttaatccaagttttgcttatgtgtctatacattttaaatatacatttatgcaaatattaaataaggtatatatcgaaatattaaggtatgtacctgttacaggcagcattgtgtccccctcagatgcatatgtgcaagttccaacccctagtacctcagaatggtactattttgagataaggtctttaaagaggtaattgattttaaatgaagtcatgtgggtgggccctaatctaattagactggagaagaggagatcaggacacaaacacctaaggaaaaggccatgtgaagacatgaggagaagatggccatctacaagtcaaggggagaggtctcagaagaaactaattctgctgacaccttgatctcaggcttctagcctccagaattgtcaaaaataaacttctgttgtgaagccacgctgtgatattttgtatttttttttttatggaagccctaacaaactgatatggtaccactgggaaggacttatgaatggcttttatttccttttttatacatttctatgtagctaccagtatttttatgttgagcttaaacaataggtccaggcactgtttcctcagagccatgaggctttctttttctttttcttcttgtagaataattgggtccagatcacacttttgtaagccgttatctatgtatgtatcttccctacataactgtgagttttgttcaaataaactgtgtaactcctttacctagtattcaaattagcacacattagagagccccagacgtttttggaatgaaatgtagactgcactcattttaaatgtgtggagcctgctctctcacattttaggagcagtttgctctgtagctgtgatgaggatttctgagtgttcccatcacctctgaaaagcatcatttctcagtgctaagctgagacttccctttatagggaaaaatacactgtgttctttggggttcataacagtgttgactggtttttgctccaactttccattaggaagtcctctgctcccacctctttatagtctattttctctccatcctccttcctttcacacacagtctttgtccacacatgggtcaaagaatgggtcaaaaatacttttgagctcaataagaaactgctacatataaaagactattgatctaaacttcagagtaaaggagagtagaaggcgaaagaatgggtttccttgtttatttagtgaggggaaaaagaaagggagctggaaaagaaggaggaagtaagaggacaggtagcaataaattctcgcctccctcattttagccactttccagaagtgaaattggtctatttttctggaaggggcaggaaagccttggtggtttgaagtcaatgctagcccttattaactgaatttgttcttaagaatgtcattattgtaagacatcaacacttttttagttacttttgagtatttactaagtccaagggacattacatatgctactcctaatccagaaatcatcccagaaaagtagcaatattacccttaaagaacctgctttccaaaggttaattttcttacctgggatcacaggaaaatgtctctgagagaggcaattgtcttactgaaagttcctcagatcttcccaagaatgggttccaacaaaaagacatcacatttattggaggtctaatatgacagaaatttcgtatacacaatattgttcaatttgttcaatgtcactagcaggtaagagttagcatcatgatcttacatggcagaaagtggaggctcacgaaggtggagtaaactgacaaatgaacatgatattacaaaatgaagctgagatttaaatctatttccatcttattctgaaggaagaagtctaaataaagaatctgaggtttttattaaatagtaaaagagtaccctcaaacagaaagagaaaaaaaaaaaaagagtgtggtaggccctatgctatcactgtctccacttcaaaaaattcctcctgactcagattaagggcaatcccatattgttagcatgggagtgaagctaacacacattttactttcaagaagttgtgctgctctgcttttaaatgacaggagaaaagtagagacaaacccaagtcatatattagtagcatcattttctcaattgcggagcaaataagaatcggacattcactgttttctaggtgatactttgtctataactaaccagtccaacatggtagccactgacaccatattgttatctcatagcatgaaaattaaaattaattataattaaataaagttaaaaatatcagtttcttaaatgcaccagccatatttcatacattgaataatcacatgtgcacaatggctaccatattggatggtgcaggtaggaaacatttttatcactgctgaaagttctattggacagaagtcatctacattaatagcttagaaagaattacagcttcctctttgccacagggtatatactacaaacagctattgtgttaaacaaaagttgtctttaggttcttgcttattaattaatctctatttgcaaaggataatttttcaagcttgacaatgagtcctattgttagataaatgaattgcacgaagtaacccaagcaaaaatcatgggtcaagacactcatattcatctttatttgatgaaaatcacaatcaatgaaagaattaaaaaacgaacaggtaaattatggatattttacatggctttcatttatttgtttttgtttattcttgcaagtaacacacattcagtttctgctattgatgacaggtactgcagagtgtacaaaagaatgctttcaaagttttcagaatctgggaacagaaatagagatagacaactttatctgaaactcagtgagctaaacgccagaatagcagtatgcaggcaatttgttcatagcacgagtttttttctggtagcctgatccctggcttatctacataacagaagagagggagagagagagggagagagagggagttagacagaaagagagagacagagagcaggtgctgaactgagtactgttggagcaaaagggtgactctcctgctgattctgttttccaacccagatctatataccacccttccttgtcttactctttgcaaggagggaggctgaccgcaatggactgtatcacctgaacactctgggcttgaccattagaaattacctacaggaaatcaaaggtcaggagaggagagaggttaggtttttctgctctatctccagcaggagctggaactattacagttcccagatctaactctcaggtggagctccacagccagtctcttaccctggtgctttcagctgtcaggcttcccactatctattaggtctgagcgtttcatcatttcttttcattccctgaactctacccacccctctgtaaatagtcccttcatgaaagcctctttatttgaaacatctggaataaattctgtgtccatctgggaccctgacttagtacagctaaggaagagaactttgaaagaaagaattgttttaaaaggatttcaaagagctggtcttacatcatgtcctgatgcctttggggttataggattaaatgaagaacttcaatgaggttacaagatttgtattctattttccatttccctaccctccattcctgttccccagagataaccttagtgaagggtttctgtatagccttctaaatattctacattgcaggctttttgaaacacactgaggaaaaggaagtctgtctccttcttgttagagaggagaacagtagttaccatcataagatttcctcatctgatggcactagtggttcccaaaaggtgatcccatgatgagcaacaccagtatcacctgggaactggttaaatctgcaaatgtataggccttgtaccagaccaactgaatcagaactctgggggtgaggtccagaactgtgaatttttattaagcctgcaggtgactgtattgcacactcaaggttgagaaccaatgggctacacattgcttttatatagctcttctgctcactcatctgagggtcattgcggccccatacagagttggattacctcaggacacctcatcaactgcttggagcagccattgtgtgacagtgataggtgaacaaatttaagtcactgggatgtaaatattcacttctctgtttacacaggagattgagaacatatctatacttgtatcatcatttgtgctctttttgtgaattacatttttatatctgttatctaagttgtcattgttaatattaggagtcttttctgtttatctagagatacataattttcctactacgtgtttttcaaaaaacattctcccaatctgttacttgtcctttaacttttaaaatggtttagttttaaaataaaaacctaaaaattaagtttttattttgtcaaggctgacaatctaaaatttataggttcttggtttcttgactggcatagaattgtttccccttcaaaataataaacatgctctctaatactttctcctttatatgtaattattagtttagttttatcttgtttagatctttattccatatatgaatttaccattgtatgatattatttatggatataaagcctttattttgccaaatgttcaatgacttattttatatctttagatatttcaaattttctttactgatttgaaatttcactattatgatatactaattctttatacatagaatgagttttcctgagatctcatctttttgttattttatctgatagataaaaattctttattatttgtctgtcttgacaaatattattttgacttatgtttaaatatgattttttaaattgccatatgctggtcttttgtttattataataattattttcttggtaatttaagtttttccataggcatatattacaggaagtagcaaatgttcaattcgcaataattctcttttgttctttattgctattttttattgcagttcatttttgtgtgctgaataaaataaacactttatacttttgtgcatagcatgtgattatacaattttattctttttttctttatatgtttcctctatggtcagggattactattttttaataccttgaattttatttgaatgcctgggaatgcttgattccttgtatttatgaacaaaggccaagttggattagctgagaagtttttgccaaacgtgtctcattaggcttagttcctcaatttgtaggttgactttgggttctgggtagtttttttttttttttttaatactttaagttctagggtacatgtgcacaacgtgcaggtttgttacataggtatacatgtgccatgctggtgtgctgcacccattaactcatcatttatattaggtatatttcctaatgctatccctgcccccttcccccaccccaaaacagtccccagtatgtgatgttccccttcctgtgtccaagtgttctcattgttcaattcccacctacgagtgagaacatgtggtgtttggttttttgtgcttgtgatagtttgctgagaatgatggtttccagcttcatccacgtccctacaaaggacatgaactcatcattttttatggctgcatagtattccatggtgtatatgtgccacattttcttaatccagtctatcattgatggacatttgggttggttccaagtctttgctcttgtgaatagtgccccagtaaacatacgtgtgcatgtgtctttatagcagcatgatttataatcctttgggtataaacccagtaatgggattgctgggtcaaatggtatttctagttctagatccttgaggaatcaccacactgtcttccacaatggttgaactagtttacagtcccaccaacagtgtaaaagtgttcctatttctccacatcctctccagcacctgttgtttcctgactttttaatgatcgccattctaactggtgtgagatgatatctcattgtggttttgatttgcatttctctgatggccagtgatgatgagcattttttcatgtgtctgttggctgcataaatgtcttcttttgagaagtgtctgttcatatccttcgcccacttgttgatggggttgtttgttgttttcttgtaaatttgtttgagttctttgtagattctggatattagccctttgtcagatgagtagattgcaaaaattttctcccattttgtaggttgcctgttcactctgatggtagtttcttttgctgtgcagaagctctttagtttaattagatcccatttgtcaattttggcttttgttgcccttgcttttggtgtttagacatgaagtccttgcccatgcctatgtcctgagtggtgttgcctaagttttcttctagggtttttatggttttaggtctaacatttaagtctttaatccatcttgaattaatttttgtagaaggtgtaaggaagggatccagtttcagttttctacatatggctagccagttttcccagcaccatttattaaatagggaatcctttccccatttcttgtttttgtcaggtttgtcaaagatcagatggttgtagacgtgtggtattatttctgagggctctcttctgttccattggtctattatctctgttttggtaccagtaccatgctgttttggttactgtagccttgtagtatagtttgaagtcaggtaggcatgcagaaaagaactccctttagggtataaagtcaagaaggagtctggaaaatgtcttagatgctgatatggtttggcagtatccccacccaaatctcatccagaattgtaatccccataatccccatgtgttgtgggagggacccagtgggaggtaattgaatcatgggggctggtttccccatgctgttctcatgatatccagtgagttcccaagggatatgatggtttagtaagcatctggcatttcccctgctggcacccgttctctttcctgctgccctgtaaattggcaccttctgccatgattgtaagttttctgaggcctttccagccatgtagatctgtgagtcaattaaaaactattttctttataaattaccaagtctcgggtatttctctacagcaaagtgagaatggactaataaagatgccaaactcaaaaatctttaatttgcagtgagggcaggggttgagcactttcgcacatttaaatctggagagaggtaccttgttagaatcctccctttccactcattatttttatttatgaagttttgaagtcatggtaccttgctttcctctttaaaactgaaagcctatgtaatgtttccttcccaccttgccttcgtcaaccgcacttggtttaagagcttccctggaagacctatcctatttgtcacagacacactcctgaggatagaaagtgttttcaacattacaagcttttcaaaggcagttaattgtgcagacagaattctaaatgttctataatacattcgtttccataaagcaatctattagggttattaattgggattacttcaaagctatatgttgattggggaagcaattatcttctctagaacctgtacttgcccctgagcttggagtgttcattttctgtgtgtttttctcctgtatttattttgtctagtgcttttttcctttactctgatttttataattaatcaaatctcctggttttctgatttttctcaaagtttttgtctgattatctcccacactatcaagaactacacatcgctcatatctgttagattttctgtgagattgtgggataagaagtaaaggaatatgcttagtcttcaatcttgaaatagacatcatttgtgtctttacctttctgaagttcaaccttagctcctagatcccatggttctccatctgtgcccctttagaaaaggagtagagtaaccaagttcaggaacactattcttagaatatgaatccagcccctatttggatatcaaggtgaacggggctgactcgttctggctcttgtgacatggttgtctttggcagaatgatgaaggaaaagtagaagtcaaacacattaactgataatatttatttaatattttactcatatcatgctattagattcttacaataaaccttctagataagtatcaattgcagtctcattttacttacgaggaattttgataaaactgtccaaggtcattcatctaggttaggggaactaggagtcatgcacatgcatttctagaatccgcatcctgagctctttaacctctagaaatgctgcctggtatcagagagcttagattttctttgctgccgatctattttcacattttttgtgcattttcactctcctccatttcaccaaaactatattatcagagttgttggctcattaattcagtacttttgatgtggagttctacagttccattcattcccccgtgatacgaatgctggaagtccacggaccacactctctggcaaggctttaagtgattacccaggctactttcatcatgccttatacaattgagctttaataatccccagaagctttagaacccctggttaccacatcttaacccaaaatcactattatcttactcaagatttcagtcgtcttaaagcattcctaaaaatgttggcctaaattcaacaactttttctgtgttcccaactacctctcagaatgaccctaacaggtatgtagatgtcttccccattttcctttagtggaagctaatttttgtttcatatcatacataccgcatggcctctaggttcttttcaccgctgtttcaaggctacgtattttcctacccccatcaaaacttacagattcttagagctccatgtcattacaagttaacatttggtagcctcccttcttgcttctgtctactaacctttattgatttatgagttcatgatgcattgttttctctgtcactaattatattccaatcttgataacttcaagatccaaacaaatgatttgccaaaccttaggagctagacttcctcttttagtattcttttctgccaccccactataaccaacaacctctgttgatctagtcatgcagagtaattgcacctcctccaaaatcatgatgataagcatgctcatgtctagatacaacctctgatccttctggagggtaattatggtagttagtctagtctgcaagttctatgcaatgaaggctaaagcacaatgtgattcttgccagagtcagaacacatcaaatttaaagaagtgtgcagagttgaaattagggtgatgcagaaagccagaaaaggaaatccacatgggtcatcaaaataaatcagtgctccagaattagacttcagtgttggagactagaaaatcttcaatagaggataatgcaaacaaagagcaatagatctgataggcaaacagacagatgcataaatagtggcaaataatcatccagaggatgttatctcagctggtttccatagatgatttgattgatttcaggggtcatgggttgagcaaatacctatcagggttacccaaggatcaaatgcaagtatggcatggatgtagaggagctttccaatgcaaatgccagttgttcctgtactcttgattgaaatgacccatcttgatcttatacaaagtactaatactgtgggatttctactttctcttgaaatcaaggcaaatttttttccttgcttcttcagtggttaagagaattatgcagaaactagctggggttggttaattattcaaacgtgattattatacataagcagcatatttgttctgtttctatttgtgcatacatatttattttttatgatcctacttcccatcagtgaagaaaagagaatacaattagcacatctgtcccattcgttgtgacaaaatatgaacttaagatctgtatggtgatttagggaagcatattcctgggagtccatggtgagcctcatggaataaaatttcagtaataaatacagttgtgggaatctgcattaaaaaacagcactaaaaataagacatgaaagagtgctatggaagctttttaaagataatttgaacagaaatagagccaaccctggagaggtggaagattgggacaaatcatgtgtgggaagggggtggagagagacagaacaagaatgaggcttttccctgacatattccaaaatatttgaatgctagtaccttgaaggaatcatcaaaaggctgtttaaggtagcaggaagggaggagaaagcaacaaagtgtaagcattttttataggcaaaatatacacaaagtcacaaaggtttgtatagctttggagaaagtaaggaaaggggacatacttaaatgtgttggagctaattgtatttgctaattttgctttcagagcagccaggaggagtgcccagagttagtgctgggctctttgccgcctcataataaaacatatattcctgggaatgcaagaatacatgccagacaccccaagttctttttgttatcagatataattaggaatgggacatcttttgaggtttctttcaacatatatgtattgattgctttccctggtgtgactgtgacatacactagtaacatgcaacaagaatttaggaaggatacaaataaacaatattaaaccaaatagatgtatctttagattttactttcctctaatgcaactggtactggtcttccatttgcagtacaaatataaatatggttatgaaaacaaatgtatttacataaagaatggtttattatttctaaaaataattacctatgtaatgttaggttagcctacatctaggcaaaatttgtgaaggaggtgctcaagtgactgacatttggaaatcactgaagtataacatgataaggcagaaagaaaagctgaaaataaaaaaaaatgtgaatgctcagatttgctaataattgcctgtacatttgggcaagtgatttaaccagtataattaacctcaattttctttcttttatttccttgaatatgaataactaatcacaatttagctaattaacagtattttgtgagaattcaatgaaaaaaatatatatacatatataattgttatctagtgttataatgtggaggtactgtggatatatcctaaaagggtcctaattgagtcatgcttttggataataccccttatgttgagtgtggccaccatgacttgcttctaaacaatcaaatatgacaaagtgctccccatattaggtttggttccataagttctagcagagacagagagaaagaaagagagagaaagagattctcctattgttctggaaaaagcaaaaagccaaaaagccatgctgtgaactgcctatggagaggaacttctaggatctgagggtcatccccaaccaacagccaataagaagctagggccctagggaatatagtcacatggaaataaaccctgcccaccaacttaatgagcttagaagcagattctttcctagttgagcactgatatcatttggctgtgtccctacccaaatatcatcttgaattttagttctcataatcccacatgttgtgggaggtaccaggtaggaggtaattgaatcatggctgtggttacctccatgctgttctcataatagtgagttatcacaagatctgatggttttataaggggtttctcccttcactcagctcttgttcttctccctcctgccatcatgtgtagaagaacatgttcgcttccccttccaccatgattgtaagtttgctgaggcctccccagccatgtggaactgtgagtcaattaaatttctttcctctataagttacccattctcaggtatatttttattaacagtctgagaacaaacatacagtaaattggtaccacagagagtggggtgcctctataaggatacatgaaaatgtggaagcaactttggaactgggtcatagacagatgttggaacagtttatagggctcacaagaaaaccagaaaatgtgggaacttccgagagatttggagggctcagaagacaggcagatgtgggaaaacttggaacttcctatagacttgttgaatggctttgaccaaaattctgatagtgatatggacaatgaagtccaggctgaggtggtctcagatggagataaggatctttttgggaactggagaaaaggtgattcttgctatgttttagcaaagaggctggcagcattttgcccctgccctagacatctgtggaactttgaacttgagagagataatttagggtatctggtgaaaaaaatttctaagcagcaaagctttcaagaggtgactagggtgctgttaaaatcattcagttttatttattcacaaagacacagtttggaattggaacttatgtttaaaagggaagcagagcataaaagttcagaaaatttgcagcctgacaatgtgatagaaaagaaaaacccattttctgagaagaaattcaagcctgctgaagaagtttgcataagtaatgaggagccaaatgttaatacaagacaatgggaaaaatgtctccagggcatatcagagatcctcatagcagccccacccatcacaggccctgaagcctaggagggaaaaaatggggcagaccctgggttccccttctttgtgcaggctggagacatggtgcccttcatcccagctgcttcagctccagctgtggcttaaaaggggccaaggtagagcttggaccattgcttcagaagatgcaagcccaaagcctttgcagctaccacatggtgttggtcctctaggtgtgcaggagttaagaattgaggtctggaagcttccatctagatttcagaggaagtatgaaaatgcctggatgtctaggcaaaagtttgctgcaggggcagagacctcatagagaacctctgctagggcagtgcagaagggaaatgtggggtgggagcccccatacaaagtccccactggggcactgcttagtggagctatgagaagagggttaccatcctccagaccctctagaatggtagatccaccaacagcttatatcatacacctggaaaagctgcagacactcaacaccagcctgtgaaagcagccaggagaggggctgtaccctgcaaagccacaaaggcagagttgcccaacgttgtgggagcccaccttgtatcagcatgccctggatttgagacatgaagtcaaatgagatcattttggaactttaagttttaataactgccctattggattttggacttgcaagaagcctgtagccctttgttttggccaatttctctcatatggaatggctgtatttacctaatgcctgtaaccccattgtatctaggaagtaactaacttgcttttgattttacaggctaacatggggagggcacttaccttgtctcagatgagactttggactgggaattttggttaatgttggaatatattaagaatttgggggactattgggaaggcatgattgtgttttgaaatgtgaggacataagttttgggagggtccaggtgtggaatgatatggtttgctgtgtccccacccatctcatcttgagttgtagttcccataatccccacatgtcatgggagggaccaggtgggaagtaaatgaattgtgggggcggttacctccaggctgtttttgtgatagtgagtgagttctcacaagatctgattattttataaggagcttttccctttgctcaagtctcattcttctctttcctgccatcatgtgaagaaggacatgtttgcttctcctagcaccatgattataagtttcctgaggcttctctagtcatgcagaactgtgagtcaactaaacctctttgctttatgaattacctatcagcatgagaatggactaatacaagcaaccagatgaaaacagggattgaatgactctgattctccttatgagtccctaagcagaggaaacatctaagccatgcctagactcttgaatcacacaaattgtgagataaatgtatgctattttaaaccattacatttgcaatagtttataaggcaaccactgaaaactaatatgagtcaagggaaactgctttggctgtctaggtatgtagataatacttattgtattattgtattttctatacacacttagaattactattacttttgttttggttaggtgaaccctacaaatctgagaaagtcatgagtattttgagaagctatcctaaagacctaggattgatttgtaaatatggacaactaacaattattgtgatttttcccagtgttctaagcagaatatctgggtcttcacatttatgattttggttcattcccataatgtcctagagagggatatgattatattcctttttcatatgagggaacttgcctaatttcataagtattctgcagtattagtcttttcttactggcctatattgattagtcctgcatcttttagcaatggagcctgtaattaggcccaaccaaaggactgcattctgctcagaatgatgattagttcaggttcagtcatatggcctatagtgagacattcttaggaatagcatagaagctaccagaattagaatctgtattttctactagacatgtatttataaggctttcagaaccaggcccttccatagacagtctaagaatagatctcaaaacaatggaaggtagattccaggaggggcaagataccaggtcttgatgagaatatttgagcccccaaatccaggtgtgtccaaaatcagaactaggctttataatttctaggctgtataattacatgaaccaataaatgccctttcttgcatttagatttttgtcttggacaaagaggaactaatttatatagttaatacaaaaaagagctgagtagggaagctaggtgtgcctaatcacaaattcagagaagatgagagagctgtatacacttatttgccagaacctctctacccttgcccctttttgtcatatgtacagtgatgaaacagaaagaacaacagaatgagatataaaatacccgggttcttacttaaggaacacacctggtatgggattgagtcaggactgtaatttagatcttctaactcccagcccagtgtaatttctgctacattacaaagcaacatggaaagttaccagaaggaaaaatcacactcccattctcacttttccagaggagaagactaaagaccagatgattaaaaagagcattattttacagtctttgttagaaagtttggtgaggctgtgggaatgacgacaacacaaagcccttagagattttgtatttcttccaatttggacttaactttttcctttcatttcctcttcattaatgctactatttgagacaagatgtggagactatcagtcagtgggataatttaggcacaagcacctagaatatttactgttttaaaaaaatcaacatgtttgcctatcatctgtgggcctggtgggaggcacattggtcataagttacagatagctacattcattaacaacaaaatgatgattactttggaaaaccaatgagccacatttcaattagcttaataatttaacttctaaatgtttttagcctttaaaaaaaaccgcaaaattctttgcttgtgtcaatcaaaactagtatggttataaattttgttaaaaatacaaatatgtctcttttttctttctaaaattattggaaaaaaacaactcccattttgatccatgttttgagtttaatgatcagcctagttaggttttgtttccaagaaataatatcatttagagtggtccccagtggggtttacaaactatatacccacctctagcacacagtataaactttggaactgatagttatgtcccaaatctctggaattaaaattatctgatctgtgttgtagaaggccccattacttttcaaaataagtcccagttaggcaagagactgactttaatcagcagagcaatgatgttctttggcactttcctgagatactggtcacttgtcaatggaatagagtataaccagactaaacatttaatattctcccttgtacatcaatggactcaatttcaaagcatctttttagtcttcctaagtggagacaaatgtgtgtgtgtgtgtgtgtgtgtgtgtgtgtgtgtgtgtgttgagagagagactataaagaaaatcaaatgcaagtaattgagcagcagggtttattacaaaattgaaatagcatgaacaatctaagatgccttataacttgctatcacggtggggatgatttaccactcttctctgccttagtgagagcttcaggtggtatgagaagaactaggtctatactggtgcagccaggaggttggccaaagaagcactggcccaaagctgagtcatttgggagaactacagcttcagccatcaactccctgtggtcaaagattggctgagaggaagaattttagtgattatgaggtatagcagattttatacctcgtaatgctgctggtaccttcttcagaccacattgatacctccttcagacaacattgcatccagtggtacctccttccactggtaccactggatgtatccttcagaccacattgcatccagtttctcaatcttgtgtgcccatcctccagcttctgcattttttgtggctaattgcttcaatctgaagatttcccttggacacttaaaccacttgccaatgatacagctggaagtgacatggtgccttatgttgggcggggcaatagccaatgactggctagtatgggaacacaaaatccagcttctttgcttgaggtaagataataaactgtaaggtggaatatatgctctagagctgatcagtccagtacttgtggctactaaaatttaaatcaattaaaattaaataaaattaaatattgtgatggtcaattgcattagccacatttcaagtgttcattagccacatatggcttgtggttagcatattgaacagtacagatatagaacatttccatcatcactcaaagttctattggacaaagcttccctgaaggaacagactaagtttgagacttcctctgtaattgaaaacttgtttagcaactttccctttatgtggcctgcctgctttacccccatattgttttcttgtaggtatgttttctttacagatcttttgcaccgaaatccttgattcaagatcagttttggggaaactgatgtctgactcaagataagtcaactggaagaaatttcagtttttttatttctattcctgagtgttaaatgccaaaatatactttcattattccttattttcttatcttatttccttcaagataactcacttaactgtatttccaacaaaactgtatttaaaacaagaagcagagttgcaattcatggctggttctttgctgagaacatagtgctccttgatttataatgcgctgacttcaggactccaagagatgtgctatacctagaaccctgtgtgtgcatatataatagacatcaaatgtgttttctgagaagagagattgttgactagttgcagggtaactatacaggtctagctgtgagttaggctttcacatgctttcctttaaattatctgtaattaattgtttagttccttaatattctatgtctgttttaaccatgtagctagcctatttttctattacacatgcacagactgaactaataggccaaatacactcagttgttgacatcattgtcattataatcatcaccaaccatttattgagtcagggcaatatactgaggtttatacaggcattattttattcaatactcataagaagcctagaagctggcgccattgttattactctcattctatagataaacagagtaaggcatatattgaagatttgtagtaatcatatagaacacaacttaattcctttccactatgatcccaatccatcagtttgccaggtcagtgggagtggggtagaatcatgattttcaaccaataccatttgctcatatttcagtctgtgtctgttttggcctactagtgcatagtcagtagtagtggaggagatcaagcactttagtgagaataagggcaatgtctcttttctctcaaattgcttgccttatgctaacttggaacgtaaacatcaacagatttggctccattacttaaaaatagatatatagcatttactttgcctgaattctaaagagctgttattactgttttaaaattgagctaattaatacaatacaactctgtaattaggtttcctttgccctagatattggccaggcattgcaggtttattctagaaaatgttcttcacagcattgggagaataatgagtctcattcacttttggcttgggccacatgtgaactagtgacccagaggtagatggctcagaggcccattaccagcacccaaagccatctattgtgacaagagtgttgacggatccagcttaatgctgcccagatattatctctgaatcctaagcaaaagacaaactgcagccacaaggcagacataaaagtctcttgctgagatttgtagaaaatgctgtcattttaattaacatttccaaacaataataatcattatttagtgctgcaaagccagccacacaccaaatgctaaatttctgagtgttttaaagcaagaaaatactcttctggtaaatggaaagaaaatttggtttgtagtttcttgactgggaatatcaaatcaaagtggggctttttcttcttttttaaaaataaaaactttgtgacttattctgatgtcattcttcctttgctaatttgctccctgacatgcaataccttcacaataattcttacagtggataaaaattgtatttttaacattgatcttaagatcttgggctttatggtccacaaaaatcaaaggtaagtggaagtgctttggaacttggaacacaaaggaatacaatcgatttttataagagattaatttttttcatgccaaagaatgtaggcaacaattacacgacttccattcatcagtctatcttcccattcctatagtttccaaaccactgatttatctcatagattgataaccttatctcctgctgttcagcccaccaaaagagatagtgcttgggaacagaaagcaaaagttctgacctcacagttggtctttgttttgaatctgggttatttgttcctagttctccctcccatctgtcttgcttaaccctccctaatcagctatgggtcttgatgccattcaataatgtcgcagcctcactgagctctcatgagctcattctgatttaggcagagcaatttcagacccatcagccaatggcgtcaaaatcttaagaagagctagaatgtacttatctctttgcatgtgtgaggcaattctctaaatcagtcattagaaggaaccctgtgagcacatattattatcatcatcatcctaattttacagagaaggagactgaggtacagagaggttaagtaactggcccagagtcaggatctgaacccaggcagtctggccatgcatctaaggctctcaacctctactttgcacttctcttccacttagtcataggtacgtgcatctggccatttctgggacttactttgatcaccttcctacccagcaggtttcagattttctttgaaaacccctaggtggagccaagttttgcatctgtattttactgtgttttttagaccttcataggtactaggagtcttgtcctgtgcgctgaatctcagccacttgacaatttttttaaaagctctacttgtttctcactactctctaaggcaagaggattctgcagaattccaattgtccctcagcagctgacttggatcttgttttaaatagattgatcacctagtactttgcctatctgtatttaatatgacattattagttgaatggtttccaccacctctcttgagtctatctactttgctccatttctacctttacatattgtgtaagccaccatcttttctcaccgggatgaccgcattagattcccaatggatctctgggattaacctctcacctctccaatccattctctatgctgcaaccgtgtagtctattgaataagaaaagctggtcattttcatgattaaaactttcatagctgcccataactcttaggatcaaaccctaaatctctgacatgggtggtgaggccttgactgataagaatccagctttacctcaatacactccatccctatgccatgcatcttcctattacagaaatttaacacaaatgccttctgccttgaaccatcttctgatgatgtaaatggctgacttatccttctggtctttgcttaacatttatttcttaatagaattctccctgtgcttgcagatcagatcaaacccttcttgcataagctctggcagcccctttcttttgggtgcttaattatgtattgagtactgtgtgtcaaatatttatcagctgaaaattgttaaaacactataagactcaagagcgttaagaccttatttgttagcctgggcaacatagtgagaccctgcctctataaaaataaaaacaataattcagcctggcatggtagtgcactcctgtagtctcagctactagggaggctgaggtgggaagatcatttgagtctggaagatcgaggctgcagtcagccatgattgtgccactgtaatccagcctaggtgacagagtaagatctgtcttgaaaacacacatgcacacacacaaacacaaacacacacacactttatctgtctttttcacagctgtcttcagtgtatgtaaactatactgcctggcctatagcagatgccagataatgaaggggtgaatgaatgaaggcatggactgctacataaaacctgctgctgttagcagatcagaaagctccataaaatatagcatttattgggcacttagtacacactataagtattattatgggattaaacatttttatctcatttcatattcacaacaacctaataagttaggttctaatattaacctcataattacagatgggtaaattgaggcccagtgacaaagctagatctgaatccaggtgatgtatagatggccaacttttgactgataaaccaaatgttcttctccccctctacacacacacacacacacacacacacacacacacacacacactgttttccagcttaattgtttattcatgatactcttgattctatggctatggacaggcttagggtaaaaacaagggtccaaaaagaagtttgtttgaaggaaacttcacgtactattcatactcttcttagtcccctctgagaccagcaacaggagtggggtggctgacaggaggacgtgaagagagggaacaaaaatgggcttttgcttttctcttgaggccaaagttctatttattaaaataaacacacaagctctctttggacatttgtcaagtgacttctcacctctcctttaggccttttgagtaaatattctttgatgtttcagacattttgtgtggatttagctcattaaaggatcaaattatatgcagcatgctgtgcaggtaaggttgagatatcaagaattgggcccgggttttgccaaccatctctctatcgattaattcaaattttatatgaaagttgaaaacactcggtgcccatggtttttcaatgaaagtgtaaaaaaatttttatttgtattataaatgatgatactgagattttatatgataaatatggtgtttgaatgaaaagtatttatttgttataaacatgtacttgttaattatgaaatcaccaaactaggatgctgcagaacctgtttgttttgtcttgcttttttttgttgttgttgttattccctgggttaagttttaaaattcataatttggaaatgatcaaatcatggcaaacatgctgaaattctttaacacattttaagattacaaatttgtttaattcaagaatgtaaagctcaggtcaggagattttattatagattcaagcttctagctttgtattttaaaaatttaataaatttgggggattttattcctccacactgtgagccatattttcattttatgacaccatctaactcagtcactagataaggccttaaaaaataatctgacaagatacactgaagtcaggaagacagccagatgaatgtgttgtgcaattaaattatatctaacaaaagaccaatggcttctctacatctgagaatgatcagacaaccatatccacatttgattgttcatctgtgggctgaagtttaagctactaactcaacttgatcatgtaatgtcatgcgacttttaccatccttcatactaaatgctatcaaaagtagattgttaggttcttggcagattatatatttagcaatctacaaaatttcattcattaaggtgttagaaggaattctctttttagtgaaacaagatacatgcctgttaatgctagatcttcataagaaaccttagctcatgcattataatttcttcaagcctctcagggtgatttgaatatgcaattttgtgtttccctcaatatgctattaagttgatgtaggcagaaaagtggatgcttttgttaatacaatgaattggatgatgtataaagaggagggataaaattagtttatactaatcatgactccttgataatacatttgacaccatgtagttagagaaggattcctttctacaaccaactcttccaggataatgaaaacaacattttaaaagcatatagaggagttcttgcaagaaggtaaaataatacattattaaaggtactgcagcttcttgataaaaattttatgataactgtacaagtgttcatctaaccttgccttttagcaatatggaaacatgagctctgcttatttcaagttgtaaattggtttcctcttattgtctcatttaaacaatcttttcctgaatagacccagaggtgccaaatgactccaaattataagctacaggtttttttttttctcctgcagaattactgtacccatgatattaacaccttccactttgtagtaaagcaacttgcatttacagaggttattatgtttactcgaaacaatatgccaacggatgataaatattagtggcgagaaagagagtcggagcactgagcacaatcttaaccgaaaaatacaagtgtagtatttagaatgtaccatgtgagggtgggggagaaaagaaagggaaaaatttccagttggcacttgcatccattataaaactaacagaggtgactggtgaaagcaaagagtactaactccagccttttctctcttcagatattgtatttgctcccttcctttctatcacagatgcatacagaaagagggtaaagagagaagcatatgccttttgggcactcttatatgtagaaataccacaaaacaacagtttttatttcgatgtattgctatctttaggcttgatgactgttgattgcaagaatttcatctacagattttttttttagtccagaggacttgcagcctgacatcatagggaggagaaagcccccaaccctctaccttgctaccgagtaccatttgccgtcattctacaactgctccagcatgacacttggattaaggtgttagactcaaacttgatcaaaactgcccaatagcctagggaatgtgttttatggagatacacaaagttggaagtatttgattgaggctctagagtggtgagtagaacccaggtgttacagccaggagaccagagtttcaatcacactattatcacttatataggttgctgcaaaagtaatatttctgaaggtaaatacattatttcacccctttaaagccccactgacttgtattgtatttgcaatgattagatctaaaagtgacttaaaataagcaaatatcctaatacagtacctgtcacaaagatgattctcaataaataatgttacattcacttctgaatttatcgacctctagggagttgttctctttttccatatatctgagcacatattaattttatttctgtaattatgatttgtcaaaacagccccacttttcatttggacttcttgaaatattaaggatcagcaaaagctaagaatgttcaccatgtagataacacataagtcagtcatgttaaagcaagctaggtgtggcatattatttaagagaattgactcaacctagaaaccttcaatcttgcagtgtaactgtccaccaagttccacttggccaaaggaatgtatgtatgtatgtatgcacattttgctgaggagacaaacaaataatttgctgggaattagtaatttagtttgtaatgagaactcaaaactgttgaccctacaatataggcagtgggatctgatggtgatttttaaataacctttttgagaaattgacaataattgttctccactaggacttaaacaagagtatattatgtttggttctaggcactgttttctgcaaatagcaagtgggccctttttttctaaggaggaaatacccgagtacagtttactaaacttacatagcactccctacataaaggacagtttccatgtgttttatattcattacttcatataactctcacacatgaacattgtgagatattttcttatttgaaaaaggaactgattactatttgcagataatacttcatgtcttcatcttctgtttctcaaaacttctcctcaactataatagttttggggagggtaactatacttccagttttgcctggtgtggttctaggttaatgaaagttgccctggtgcaattaatcatggttttccattttagtattgctccagtttggagaataaattatatagtcccctggttaggggacctgtattcattttccagtatgctgtggacaatgctgggtcctgctttcttgagaacctgaggccacccgtgtccttgacccattctttctgtataatctgtcctgccagcactttctctgctttggagaatagtttcaagaataataagaagaaataagatagtcaaaggatttttttcccaaccatttgtgttatgggaacattcactttttctatgatttcataatgtcacctgtgtaaaaccaataaacatctcccacgtatggtatcaagaatattgatccttaataactttgtgttcaacagcatttatataattatgtttcagattggggtggcaagtaattagtgggttgtaaattctatttaatgtttccaaagaatcatttaaaagcaaaatagaaatctagtgaagaatatcagaatgtgttgcacagattagaggacacattacttggaaaaaattttgtttcatatgtttttgaatagagaagagacaaatatattaagctctaccatgtgttgggtgttgtgttagatatttttgcattctttaatctacaaaatatttttaaatcaatattattaacccttgtttctattgaacattaaagtgaaagtaatacgttgcacaaacataatctttgcttttaagctgttttaacttctttagacaatattttaggttcccatcttaggacttctgatgcaatattttcatacctgtgggtccttgtcctttccttgacttctcgtttagctacggtttcaatatactgatgcttcttttaattgccatcactgtagaccattgttttaacaattaatattcttttaagcagtgttaggcaaacaaaatatttctgcatctcacgatgttgaataaatcagtggggaatggatatgttcaaatttctgcaaattctaatagctttgcatgttttactgtgtttttagaatataacattggctgggcatggtggctcatgcctgtaatcccagcactttgggaggccaaggcgggtggatcacaaggtcaggagttcgagaccagcctggcaaacatagtgaaaccccgtctgtactcaaaatacaaaaattagctgggcatggtggtgggtgcctgtagtcccagttactcgggaggctgaggcaggagaatctcttgaacctgggaggcggaggttgcagtgagctgagattgtaccagtgcactccaggctaggcgacagagggagactctgtctcaaaagaaaaaaaaaaagaatataacatctacttttaaaaagtaatgttcttgttgtagtcatccagatgatttcagaaaacagtaagtctggactagcttaaatgaagttttttattatgaattttaaattttttggattgtgcattccatggtgggaaagtccgtgcagacatttattgacttaagtttggggttaatagttctgtgaaagaagaccgataggatttgtggagtacattgcatttgtgggaaaatagtcctattagcagtaatgtttcagcagcagctgtaggacagcaggttacaaagttgtatgaagaaaggtcacaggtaggtgagagaagaagaagagagagagagagagagagagagagagagagagaaagtatcaagttcaacacagatgttacatctccattgccaggtcaggcaactcgttgtctattatattaaaattatctgtattttcaccaaactttctatcttcccagaagcatccttttttggggggatttggttcctagtttcataattttttttctaatgtaaccattattcacatgttaaattgagttcttttgaagtttaacatacagttgtagcttgctgggtttacctatataagaaagcattaccaagacagtttctaattctcccattgtttttatttcttgttaagacctcagtggaccagttctgatactaacaaaccatcacctgggcctcaatgcatggcatttcttccctgaaatggtgttctgctgttattgggttagtatagtgatgctcaaacctggctacgtatgagaaatacaaaatattcatggctgggctccatgcccaggtattctgatttgatttggtattacatttcacactggtattattaataagctacccaggtgattttaatgtgtggttctgtttgagaaatactggtgtaaggtaaattactagacaaatttgaaaataacttatatggtagttagaagagtgtttttctaaaacaaaatcgtacatttacttgtgtatcttcatagccctggcttatctaatccttagaagatgaagttcaagctcaagttcttgttcctctccagcctcactgcatggtaggttcctccttttgatatacattccagtaataccaaagtgatggtagattcccagttatactcatgttagttgtatttctgtacccctgtccgtctaaaatgccctttgtcttcctaccttcttattgctgatgctgatactgtccaatcacatttcagaaacttccattctagaaaaattcccacgatgcttcatgtagcacaccctcctttaataactttaaacttcatgcagttatagagttataaatgtcccttcatgttgtaatttatttattctgcaactatcttaggttgtggatcccttgagtgtttggagagaaatagccttttgtctgtatccatgtgtggatatggatgtacatagtagatactcaataaatatttgtgaaattagctatatttcctccttcataactttaaaaaataacttaaaaacagtattcagggctgggcatggtgcctcatgtcggtaatcccagcactttgggagaccgaggcgggtggatcacttgaggtcaggagtttgtgaccagcctggccaaacatcatgaaccccatctctattaaaattacaaaaatcagctaggcgtggtggtgtgcacctgtagtcccagctactcaggaggctgaggtgggataatcactttaacctgggaggcagaggttgcaatgagccaagatcatgccactgcactccagcctgggtgacacagtgagattctgtctcaaaaaaacaaaacaaaacaaacattattcaacagattgatgtctcctgctacctaaattccttactctttgtgtgccacaatttgagctcagtgaaaaaaatccaaagtcttttttttccttttaatctattgatattgtcttcattcacttcaaaggtaagtagcttgacataaaaattgtgttgagatatgggaaagacaaagacaaccatgagctcttgctcttaacaagattcctcatttataagaagaaggtaaatgaagattggaggatgcaatttctgtaaatacagtggaaatgtttttaaataataaataggagaaattccaagtagggattactgatagttacacaaagatttcaggttttgccactatattctcaaaacgtatttgaaatttcaattagcattaattattctgcatgtaactattttatgacatgacatatagtttttcaactcaaggaactgctagaactataggtttcttgttgaaattgtttttattatttttctatcttttctactctgcatttttctttccttccttccatccttcttttgttcctttttcacttattttcctccatctcttctttttcaatgtctctgtctcactttctcttattctttcttcctctaaatttgaaaacattgaaacattttttacatatctatttctcatatccactacattccattactgttctaaatgccagtaagtcaaagataaataagccatagcaactatccttagaaagtaagagtttcatgaggcagaaagacaaaaatcaaacaattgcaatgatagatgttatagatattaaaatagatgtattgcaaggtgctatgagagcaaagaagagcaaacagaatgccttatgaagtgtaaaatattcttaaaaggtcaaaggagagaacaaacaggataattttgagctgctatcatgtacaagcttactactgagcattggtttcttcacgttattaacacatacagtcttcataattaactgtataagatgggaaccatacttatcaccattcatttagatttgaaaactaaactagaaaagttgtgtgaatttccaaggtttcatgtctaaggtgatgtcttcttgccttaaatataattattaatattattatatgcagctttaagggactacacactacttggtgctgcttgttattattggggatagaagatgtagctgtaagttagctaaatttgttaagagttaagtctgtgccaagtactctactaggtctttgtgatattaactcatgaacaccaatttgaagtccgcagtcctatgatctattttaaagatgagtaaactgagtgtaaaccaaaggttaggattataaaggttaagaaaggtagaattgactgttgtacatagccacttttgagctagccatgcatgagaaacaagacagacttttgcaagaacaagtcatgataacaactatgactttgaggtgtcatgtaagcaacacagatgacaggtgctttacatcaaatactacccatagaagcaagctccacttttcgcactatctggaccagttaaggtagcagcagcatggtgtgatagaggtcacttgagctatggagtcagcacagaatttcaattctacctatgctctcgcttcagtaatcttcagaaaattactaaaatctcgaggtctcaaattcctcatatttctaattgggagagtgataaatatttcaaatgataggtggaccaattgcatagttcattcacatgcttggagctcagcaaatatatatatttttctacttatacttaatttgattccaaaattttactggtatggtaaataataaaacttagaataaagtatcattttgaccagtttctaagcaatttaaatcccccattgtggttttgtgtctgaagctggttcctgccggtgggttcgtggtctcgctgacttcaagaatggagccacagacccaccagcaggagccaactccagacacatcttagggactcatctgggattcaccacgcattgagtaccactggacacctttcgcttgctattctgtcttatttttccttagaattaaggggctaaacactgggcacctgttggccagttaaaagcaactagcatggctgctggactaaagacacgggtgtcaggctttctgggaaagggctctctaacaacccccaactctaaggagtcaggagcgttagtttgcctggaagcagcttctgcttttcctgcacttctgggctgagcagagggtcgacagagaggaaagccattcagctccagggtcccgacaaaaagttggttgaccctgcagccatgagcagagctctcaaagttacgttgccaaagtgagacttgcccatctatcccatctatcctgacccttgtctcctgggtcttaacacccatcagtcaaacttcttcctgcctctcttctccgaggctagtcctgcttctaaaaaccactccctgtccctggtactcttctagtttctcctgtaaggatgatttctaatataaattttgggactctgttcctttctttaagcacccgggctcaccaatcagaaagacataatttttgcccaaagccccatcgggggggactatatagaattttaggatccctcctcagactagcaggcctaacagaggctattcccgaagctagaatatggggagcctcagaaattatagactccaaaattggaggatatccctcctattcatatgtaaagtgaggacaaaaagcatcactcttccaaccctggagatcccttccctccctcaggatgtggcccttcactccattttgaggcatatcatgtttacaggacaagggtaaagtcccaataccaacaggagaaaatgcttatgactctaactaacaggttttcgagactgcgtcggtaaaagccactaaatcccacctttctcggtcctctttgtggtctaagaggaaaggcaatgatgcaggtttttgagaatgtgtcagtaagggccactaaatctgaccttcctcggtcctctttgtggcctagaaggaaaacaagtgtttctgctgctgctttggtgagcacaactatccctaacagcagggtccagggaccattgtagggtcttgggtgggggaaaaaaacaggccaaaactgcaagaatttttttttctttctgttttagatgggaaacactcaggtatcaacaagctcacccctgaaatgcatcctaagccattggggccaattagacccacaaaccctgaaaaagaagcagcttacttttttctgcactacagcctggcctgaatattctctctctgaaggggaaaaatggccacctgagggaagtataaattacaatactatcctgcagcttgatgtttgctgtaagagggaaggcaaatagagtgaaataccttatgtccaagctttcttttcattgaaggacaatccacagctatgccaagtttgcaatctacattccacaggaggacctctcagcttacccccatatcctagcctccctacagctccccttcctattaatcatgagcctcctctaatctcccccacccagaaggaaacaagcaaagaaatctccaagggaccataaaaccccctgggctatcggttatgtccccttcaagctgtagaggaaggggaatttggcccaacccgggtacatgtccccttctccctccctgatttaaagcagatcaaggtagacctggggaagttttcagatgctcctcatagatatatagatgtcctacagggtctagggcaaaccttcagtctcacttggagagatgtcatgctattgttagatcaaacgtttgcctttaatgaaaagaatgtggctttagctgcagcccgagagtttggagatagctggtatcttagtccagtaaatgatagaatgacagccaaagaaagggacaaattccataccagtcagcaagccatccccagtatggatcccgactgggacctcgactcaaatcatggggactggatttgcaaacatctgttgacctgtgttacagaaggactaaggagaattaggaaaaaccccatgaattattcaatgatgtccaccataacttagggaaaggaagaaaatcctaccgccttctgcgagtggctatgggaggctttaagaaaatatactcccttgtcacctaactccctcgagggtcaattgatcctaaaagatgtttattacccaatgagccacagatatcaggagaaagctccaaaagctagccctgggccctgaacaaaatttggaggcattattaaacctggcaacctcggcattctataatagggaccaagaggaacagaccagaaaggaatagcgagataagagaaaggccacagctaagagaaaggccacagctttagtcatggcctcagacaaacaaaccttggtagttcagagaggacagaaaacggagtatgccaatcacccggtagggcttattatcagtgtggtttgcaaggacactttaaaaaagattgtccaacaagaaacaagctgctccctcacacatgtccactatgccaaggcaatcactggaaggaacactgccccagaggacaaaggttctctgggccagaagcccccagccagatgatccaaccacaggactgagggcacccagggcaagtgccagctcatgtcatcaccctcactgaaccctgggtaagtttaaccactgagattcaggaaattgacttcctcctggacagtggtgtggctttctcagtgttaatcttctgccctggacagctgacctcaaggtccattaccatccaaggaatccggggacagccgtaaccaggtatttctcccacctcctcagttgtaattggagactttgctcttttcacatgcctttcttgttatgcctgaaagtcccacacccttattagggagggacacattagccaaagctggagctattatctatgtgaatatgaggtacatgttacccatttgttgtcccctacttgaggagagaatcaaccctgaagtctgggcattggaagaataatttggaagggcaaaaaatgcctgcctagttcaaagcaggctaaaagaacccaccacttttccttatcaaaggcaatatcccttaaggcctgaagcccataaaggattacaggatattgttagacatttaaaagttcaagtcttagtaagaaaatgcagcagttcctgcaacaccccaattctaggagtacaaaaaccgaatggtcagtggagacaagtgcaagatcttagactcatcagtgatgcagtaattcctctatatccagctgtatccaacccctataccttgctctctcaaatactggaggaagcagaatggttcactgttctggacctcaaggatgccttcttctgcattcccctgcgctctgactcccagtttctccttgcctttgaggatcccacagaccacacatcccaacttacgtggacggtctttactcaagggtttatggatacccctcatctgtttggtcagtcactggcccaagatctaggccacttctcaagtccaggcactctggtccttcagtatgtggatgatttacttttggctaaacagcaggctactctagatctcttgaactttctagctaatcaagggtacaagttgtctaaattgaaggcccagctctgcctacaagtcaaatatttaggcctgatcttagccagaggaaccagagccctcagcaaagaatgaatacagcctatactggcttgtccttgccctaagacattaaaacagtagtgggggttccttgggatcaccagcttttgctgactatggatccccagatacagtgatatagccaggccactctaaaatcaaggagacccagagggcaaatattcatctagtagaatgggaaccagaggcagaaacagccttcaaaaccttaaagcaggccctaatacaaactccagccttaagccttcccataggacaaaacttctctttatatgtcacagagaatgggaatagttcttagagtccttactcagactcgtgggacaaccccacaaccagtggcatacctaactaaggaaaccgatgtagtagcaaaaggctggtctcactgtttacaggtagttgtggtggtggccagcttagtatcataggctatcaaaataatacaaggaaaggatctcaccatctggactactcatgttgtaaatggcatactaggtaccaaaggaaatttatggctatcagacacccacctgcttagataccaagtgctactccttgagggactggtgcttcaaatatgcacatgtgtgaccctcaaccctgctacttttctcccagaggatgtggaaccaatagagcatgactgccaacaaattgtggcccagacttatgccacccgagaggatctcttagaagtccccttagctaatcctgaccttaacctatataccagtggaagtttatttgtggagaatgggatatgaagagcaggttatgccatagttagtgatgtaactacttgaaagtaggccacttcccgcagggaccagcacccagatagcagaactagtggcgcttacccaagccttagaaccgggaagggaaaaaagaataaatgtgtatacaggtagcaagcatgcttatctaatcctacatgtccatgctgtgatatggaaagaaagggagttcctttacagaaaggggaacccccattaaataccacaaggatatcatggagttattgcacacagtgcaaaatcccaaggaggtggcaattttacagtgccaaagccatcaaaaagttgaaggagaaaaagcagaaggaaactgttggacagatgctgaggccaaaattgcttccgggggaacttcccattagaaatacctatggaaggacccttggtatggaacaacactttccaagagattaagccccagtattccccagccgaaacagaatggggactttcatgggggcatagttttctccccttggggtggttaatgacaaaagagggaaaggtattcatacccgaagccagccagtggaaaatacttaagacccttcaccaaacttttcatatgggtattgagaacactcttcaaatggccaaatctgtatttacagagtcaaatctcctccagaccatctgacaagtagtcaaagcctatgaggtgtgccaaaggaataatccgttggtccactgtaaggcccctctgggggaacaaagaatagggcactatcctggagaggactggcagttagacttcacccatatgcctaagtcaagggagttcaatactttttggtctgtgttgatacctttataaattggatagaagccttcccctgcaatacagagaaggctcaggaagtggttaaagtcctaattcatgaaatcattcctagatttggtcttccccaaagcttacaaagtgacagtgatccagtttttagagccatgtaactcagggaatttccagggcaccagggatacaatatcaccttcattgcacctggaggccacaattctcagggaaggtcgagaaggcaaattgaacactcaagaggcacttaaggaaactaacacaggaaactcatctcccatggcctactctcttgcccatggccttgttgagaatccataattctcctcacaaaatggggctcagtccatatgaaatgctgtatggacgaccttttctcacaaaagacctccaagtcatccaaacagctccattcagatggcttgtcagcttctcagagcccccccaaaatcatcacatcctccctgcttaacagtctgggttttgtaatggcaaacatactccctgcatgaccattcacccctggaacccctgtggcagcacacccaccactagtgaatgccttctcatccccaatttcaattactctctagaatggttcctagtagatacaaaacggtttttttctccagtgagaaaatagaacacagggagcctctcagtttgttcccaacaccattttccagccactcactggagctacctttgcaagtactctaggagtatggtaaaatgaaaacaacaaactcacacacctttttaacatacacaaccagttctgtctacccagccaaggcatattcttcttatgtggaacttcaacatatatctgccttcccaccaactgaacaggcacctgcaccttagtcttcctaagtcccaacattgacattgccccaggaaatcagatcctatcagtgcccctcaaagctcaagtctgtcagtgcaggggcatacaagtaatgcctctacttacagggttaggaataaccactgctacaggatccggaatagccattttatctacttcattatcctactaccacacactctcaaaggatttctcagacagtttgcaaaaaataacaaaatctgtccttactctacagtcccaaatagactctttggcagcagtgactctccaaaaccaccgaggcctagtcctcctcactgctgagaaaggaggactttgcaccttcttaggggaagagtgttgtttttacggtaaccagtcagggatagtatgaaatggtgcccagcatttacaggaaaaggcttctgaaatcagacaacgcctttcgaactcttacaccaacctctggagttgagcgacatggcttctcccctttgtacatcctgtgacagccatcttgctatgactcgcctttggcccctgtatttttaacctccttgtcaaacttgtttcctccaggattgaggccattaacctacagatggtcttacaaatagaaccccaaatgagctcaactcacaacttcttccgaggacccctggaccaacacactggtcctttgactggcctagagagtccctctctggaggacactacaactgcagggccccttcttcactcctatccagcaggaagtagctagagtggtcatcgcccacttcccagcagttgaggtgtgctgttaagaggggggattgagaggtaaggccagttggacttcctgggttgagtgggaacttggggaactttcctgtcttacaagacaattgtaaaatgcaccaatcagtgctctgtaaaacacaccaatcagcactctgtaaaatgcaccaatcagcaggattctaaaagtagccaatcgtgggaaggattgaaaaaagagcactctgataggatagaaatggaacatgggaggggacaataagggaacaaaagctggccaccccagccagcagcagcaacctgctcgggtcaccttccactctgtggaagctttgtcctttcactcttcgcaataaaccttgctgccgctcactcttcgggtctgtgtcatctttcagagctgtaacgctcaccgtgaaggtctgtggcttcattcttgaagtcagcgagaccacaaacccactggcagggaccaactctggacacagtttgatatttcaatgaaactccacttaagctcattatttcctcaaaaagtatattctttgtttgttttgcatgtcttatgttttgacttcctaatactccagcattttaaagccaattctcactgttattattgagtctataacactgtatcatataggcttatactttgtatttattatgtgagtacatattcctggagtagatgcctggacttcatcatttcaaagtctcagaaagaaggcttttctctctaaactcctgccctactttgaaaaggagaaaaaactgctgaacaggagcttggggtgatggaatagtggaagacattttgtagcaaaattaaatgattcaggaatataaatcagcttataattcaactaagtcttgagggagtaatttttggcactgagacaactgctgtggatagacccacacctgtatcttatggtatcacttgccttatctttattttcttctctccacttctaggctaagtttagtttattttctgcagcttgtcttatggaatacccttaaatggcttcagggttctctcataggtgcatattgtagcccattattgcttagggagccagcaggcagaggagcaaaggagagtaatgagtccttacataacactgcagtatttgctgttcccaactgctctgttccttgctaaggcagtatggggagcagttacctctaccacatacagtctgaatgtcttaatcattcttggaaaaacaatttcagtacactcattagagccaaaagagttccatttctccaaagggatttttgaaatgggaacactgaagtagaatctgacagaggcagaaaagccagaggtattcaaagggataagaataaaaacaaaggcagggaggatcgtgtttagagtctgtcattgggaatgaaacaagcccccatttgatccaggtttttatgaccatcataatagacatagccacttgaatatataaagatttcttcctatgtgtataacaaaatgaaaatattaattggccatctctgaatagacatcaaagtcagacaaaacttcttttgtgattatcttttgggagtcataagggtaaagataagaggattttctactgctggccatgctaaggtagactatgatcaggtctaatagagcctgcttcaaggatcagatgagtatgagacaacttcttatactttagggagaagagcaataaaaagttttcaattcatccttcatccttagtcctccctatattgctgctagtagcagtactgggtgtagggctccaacgtcagaggcaattcatataggactcagactcatcaagcaaacaacaaagaacaagaacccagcagagtgactctttgttataaaggaaggtaagatccttgaacagtgtgtttatactgctagaattctctcatactcatccactctggcactctctgccatatctttgcaaaatgactatgagtgtgtatgattgcacacataaaaaatagactcactaaagagtctacaaaagtagactcattaaagtgtatatatatatacacacacacatatatacacacatacatatttatacacacacatatatatacacacatacatatatatacacatacatacaagtatattttatatatatatgatagtagcagccaagtctaggcatagaatatcacagtatgtagtagctaatgttgaacatagtactatagaggagagatttccttttatgcttcctaccctccttcactatcatacatatacatgctaacacgtatatcagtgattcttttgctggatcagaggaggtagtgtatactttgggcaatcccgtctaacaagcactgtatgggttgccatgtggcagttacacaacaaataacacagaatttggtgaattggatgcataaagttttcttttcctttctttctgcatctttctttccttctctgagaaaccaggaccaaattatctccttgagattcatggacttatattgggactgaggacttccaaaggaggagaaaaggacattgccattcatagtctgatgaggccaaggtataatttaactttacactaaaaagagtggtatcatattttgtatttaatgctggtgaggtatgtgtttcctctattgtttattaacataaacatgcattttagagcttgagactttacagaaaagaggaatgcaaaagaaaagggaaaggaaatagcatgtattgggcacatataatgttatgttttgggtacgtaatccgtgtgtttaaaagaactcttagatgatactaataactaagctaaatcctaaccttaaccttaactgtgtccttaataccagcatcaacacaaaacccagagaacaaataagttgggcacacaatctattcctataagctttccagatatgttagctcattcaatcctaccaaaagttctgtaagatatttcgggttgaatctctttaaggtgtaggaaaggttgagtaatttaccttaagtcatataattattggaaggtagatttgcagtgtgaacttagaagtaactgacatttaaagatggggagaatgagatgaaatgtgaaggaaaaagccttggagacagagccaaaactggatctcagattctatgcctgctaaaaagtgttctttctaacctactatcttcactggggctgttaagtgcctataaaattaagtatgaaagtatcaatcgaaagtgagaaggaaaaaaggtggagaaaattgcacttgccacaaacagactcaggattttgattccccttctttcttgggttacataatctaaacaaaagaacttcaagaattttcagtcacagctataatgtccccggtaatgtttttatgtagcctttaagttttttttcctctgcattgcttttattacctgctgagtattattatattttacacattatttgacatgaaaccttgcccttgatgaaatgacactttcttatattctcttgaaagcttgtaagaccagaagcggattattccatagcttctacctttcttgaataaagctacatgaatacactgtaactttggtctttggaatggagtttcttaaagagaaatatagatggaagaatatcattttgtctttttatcttttatcatatgcaagcatagatgagcaaagagtaattcaagagaagaaagattttacatgacttttttcattgattcatttagtaactggtaatatactgacaacatattatgtctaattatatttgcccaatatatattattaacaattcaaatctcacagtatcgtgtttttctgtttatttttttaaattgactttattttttaacttatgaattatatgtgatattttaatataagcatactatgtataatgatcaattctggataactgggatattcatcaccttgtttttctatttacatttgtaattgagggggtctggggtcaatttgcagtacaacttgaataaatgtagaaaatctaatggtgtgcattctgtattactatttgctcacagattttgactttgatattttacccttatttttccattctctgttttaaaaatatattcatttttgtgtcttaattaattacacttatttaaactttttcaaatccttttgggaaatgaagacgataggtagagggttagttaataagcaagcaagaaagctacattaactccacgacgttgtgtcaatcagcctgttttgtttgttttcagtttaaagtgagaaatttcttaaagggatttaaacaatttatcctgtttggcatggttcctaatacctataaagtatttcctgctctctattttgaaacaagaatgataaattggacaaggttgatagaattgaacagcaatacgtgtgtgacattttgctgtcatgtcttcaaatctgttcatataatggaaattctgcattgtagttgaaaataatttatctattttaatgcagatgcagatgtattcagttcaactgattattacttcactgtatacactgatcagttatttatgtttgtcatcttattagtggcttttgatcactttgatttttttaagggtgattaaaagatacttgaaacatgttgcagtatctttcttaagtagcctaacaaatgtaattagtcaaatactaaagttaactcataaaatttgtgactcacatagaataatcttcaaaataaaactctactaacttataagcttaggtattagtatgaactaagagttcttcagatctttcattactacttttttcaaaatacctgatcaggatgaataatcagagaaggaatatgtgaattgggggaggttttactgtatgatataaacgagatgatataatctgactctaccacagtaaaatataccaattctactttcatcgtctctaatactaagcaaaatattttaagacacaactgtagcccgaaatagtaactataccatctaaaagctaaccctaattctagcactaatcttagccaaaatcctcatgctaatgctcaatctatttaaagcctcttactctaggagattaacatttattttcatgctaaagttgaatcctagccttacccctaacagtacccttaataccagcatcaacacaaaaacctgaaaaacaaataagttttaactcacatatgaactttgactggtagtgtgttctcagggtcactttgttgaggaagatgctaaaactcagtgggaaagaatttggagacaatgaaccatgtctttcctaatacagaagtaaaggagagcagcatgggtgccaagcatttgctgtccttatcctaataataccccttgccctggtctggccctgactccctaaaggtaaacattgctggcaagtcatatgacaagagaagaaaattattctctgctttggtctctattataataaagagtagggcatgagttcctaaggaccaagttttcttccctagaggaaatacacttttttaaatgtcacaacttgtcaaaatgattcattcattccatatatatgaaagaatatagacaaagaatttagtatctcaatgctccattttaatattgaagtgactgattaccaaagagaccacctaacaatcattctgctatcaagaggatacgttttcttattttacttctctgagacatttatgtaatatatcaaatgttattaatccttgccaattgttaatttgaaataattaatggcgtatttcacaggatataagcataattttctcagtgtagtttatttttctaagcacatgggcatgatattcaagccatggctagaaaaattctttttaaattagtttcattgaaaattcatagtacagatataactaaaaaacaggatgattaactcccagatgctcttaaagagcttcaacaattatcaatccatggttaatcttatttagttaatttacatattacttatatgtttttattcaaattttagacattatctgaaaatatctctataacttaatgacttgatttttaaaaatagcttaattgaagaatatttgaatatcataaaattcacctatttaaaatgtacaattcagtggtttttagtatattcagaattctgttagaattaccacaatcttatttaagaacattttcatcactcccaaaagaaaccccatatacattagcagtcactccacattttactcccaccagcaaccctagggaatcactaatctagttttctacatctattttcctattctggacattaaatataaattaagtcacattatatttgatctattgtgtttgctttctttaacttggtgtaatgcattcgagattcatccatgttatattatgtatcagtacttactccttttcattacctagtaatactccgttgtatggatataacacattttgtttattcattcacagttgatacacattttgattgtttccaagtcaaggtgtttaggatatttatcaccatgaacatttataatttatatgttttgagaatatttcaagttctcgcttctagctatcctgaaacgtgcattacaatgtgggttaatatagacaccttactctactttcaagcattataattactccttctacctaattctatgtttgtacccattaaccaacctcttcatccctaaccctgaaaacacacacatgcagctgggtgcagtggctcacgcctgtaatcccagcaccttgcggggctgaggtggatgaatcacgaggtcaagagttagagaccatcctggtgaaaccccgtttctactgaaaatacaaaaattagctgggcgtggtggcgtgctcctgtaatcccagcgactcgggaggctgaggcaggagaatcacttgaacccgggaggtggaggttgcagtgagctgatatcacgctactgcactccggcctggtgacacagtgagactctgtctcaaaaacaagacaaacaaacaaaaaagcaaaaacaacaaaacaaaataccatgcatcctttccagcctctggtaaccattgttccactttttacctcttttaactccatgagatcaacttttttagctgccacatatgagtgagaatatatgatatttgtctttctgcattttgcttagttagcttaacaaaacagcctctagttccattcatgttgctccagatgatttcaattttttatggctaaatagtatttcattgtgtgattgtaccacatattcattatccatatatccatttgtggatgcttagtttgattcactctcattgctattgtgaatactgccacaaaaaaacatgggaggcatgtatccctttgatacactgatttcctttctattggataaaactcagtggtgagattgctagattgtatggtcgtactatgtttagttgtttttttttttccctgaggaatctgaacactagtgtctttttaatttttttattttgtgggtagataggaggtgtatatatttatggggtacatgagatatgttgatacaggaattcaattcaaaataatcacatcagggtaagtcgagtatccatcacctcaaacatttaaactttatttgtgttatgaacaatccaattatacacttttagctactataaaatgtacaataaattattgttgactgtaatcacactattgtactatggaattctagatcttactcattctaactatattttgttacccattagccatcctcaatttcccccagcctctggtgaccactattctacactctatctccatgagtttgttttaatttttaggtcatatgaataagtgagaaaatgcaaactttgtctttcagtgcctggcttatttcacttaatataacgttccccagttccatccatgtagttgaaaatggcagaatctcattcttttctacgactccccagtactccattatgtatatgcatcgcattgtctttatccatttgtctggatggacacaggttgtttccaattcttgaatattgtgaatagtgatgaaacaaacatgtgactgccagtatctctttgatatactgatttcctatctttggatacatatctagcagtgggattgctggatcccactgctagatatatatccaggtagttctcttcttgcttttttgaggaaactccaaaccctcccaactgttcttcatagcagttgtactaattttttgtcagatggaaagtttgcaaatattttctaccattctctaggttgtctcttcactttgttgattttttttctgtgcagaaactttttaatttgatgtgatcccatttatccacttctgtgttagtagcctgtttgtgggatattactcaagaaatctttgtctagatctatctttgctggggagagtttccccaatactttatttcagtagtttcattgtttggggtcttagatttaagtgtttaatccaacttgatttggttttatatagcaacatatatgcatctagttagtttcattcttctgcatatggatatctagttttcccagcaccatttactgaagagagtgtcctttccccaatgtatattcatgtcacctttatcaaaaatgagtttattgtagatgtataatttccagattctctaatctgttccattggtctatatgcctatttttatgccagtgccatgctgttttggttactatagctctgtagcataatttgaagtcaggtaatgtgatgcctccagctttattctttttgctcaggatagctttgtctattctggatcctttgtggttccatataaattataagattgtttttactatttctgtgaagaatgtgattagtattttgattgggattgcactgaatctgtagattgctttgagtagtatagatattttaacaatattgattcttctaacccatgaatgcatagattgtctttcaattctttcttgtccttttctatttctttcatcagtgttttatacttttcataatagagatcttacacacttatttggtttagttaattcctaggtatttaatttttgtgtggctattgtaaatgagattacattttacatttcttcttctcatcattcactgttggcatatagaaatgctattgatttttgtatgtcaattttgtatccttcaactttactgaatttgtttattagttctaatagttttcttgtggagactccaaaagaaaattattagaactaataaacaaatttagtggagtcaactatattgtggaatcaaatataaagtcatattatctgcaaacaagaataattggacttctttcattccagtttgaatgccctttatttctttctcttgtctaattgcttcagctaggacatccagtattatgataaataacagtggtgaaagcaggtattcttgtcttcttccagatgttagcagaaagcctatcagttatttcctgttaaatgtgatactagctatgggtctgtcatatgtttttatagtgttgatgtatgttccctctatacagagtttttttagggctttttttttaatcataaaggaatgttgaattttatcaaatagtttttcagcatcagttgaaacaatcatgtttttttgttcttcattctgttgatacgatatgaaatgagtttggaagtatcccctcctcctttatgttttggaaaaatttgagtaatattggtattggttcttctttaaatgcttggtagaatccagtagtgaagccaacaggtcctaggcttttcttttcctggagactttttattacggctgtcatctcattattcattattggtctgtctgggttttgaatttaattgttcagtcttcgtaagtcatatgtgtctagaaatttacctatctattcaaagttttgcagtttattggcatatagttgtacgtagttgcctctaatggtcgcttaaatttatctggtgtcagttgtaatgtctcctgttttatttctgatgttatttatttgagtcttctctctttatttcttagttagcctggttaaaggattgtcaattttgtttatcttctcaaaaacccaagtttttcttttgttgacattttgtaatttttttatttccatttcatttatttctgctctgaccattattatttcttttcttccataaacttagggtttggtttcctcttacttttccagtgttttaaggtgcattgtcaggctgttcatttaaagtttttctaattttttgatgtaagtgtttattgctataaattttcctgttggtactacttttgctgtatcccacaaatgttggtatactgtgtttccatttttattgtttcaaaaaaattttaaattctcatcttaatttcttcattgacccattggtcattcagaagtatattgtgtagtttccaggtgtttgtatagtttccaacatttgtctcgttattgagttctagttttatttcattgttgtcaaagaagatatttaatataattccaattttcttgaatattttaagacttgttttttggcctaatgcatagtttacccttatgagagatccatgtgctgaggagaaggatgcatactctgcagctgttggatgaaatgttctacagtgcagattaagtctgatgtttctttgttgattttctgtttcaatgatctttctaacgctaaaagtgggatgattaagtcttcagctcttattgtattggagttgttctctctctttagctctaatatttgctttatatgtctgaatgctccagtgttgggtgcatatatttacaatggttatatcttcttgctgaattgtcttctttatataatgatcttgtctttttttaaatagtttttgtcttgaaatctattttgtctgatagaaatatagatacatctgctcttttttggtttccattggcataggatatctttttccatttctcttaattttcaatctatgtttatctttataggtgaagtctgtttcttacagggaacagaccactgggtcttgtgttttttatccattcagccactctatgtcttttgattggagatattaggccacttattttcaatgttattaatgataagtataaacactctcctgtaatttttgttattttctttctggttgttttgttgccttcttttccttctttcgttcctccttccatcttccttttagtgaaggtgattttctctagtgccatgttttaatttctcacttttgtttttttttgtgtgtgtatctgttgtgtgtttttttatttcagattaccatgaggcttacaaataatataacccactattttaagctgatgacaacttaacactgattgcaaaaataaactattagtaactaagagatagcttataaaactctacactttttatccatcgtttttaacttcttgttgtttctatttgtaccttgttatactgtctatgccttgaaaagttgttgtagttattatttctgaccaactcatcttttagtctttctacccagaatataagtagtttgcataccattattgcactgttataatattgtttttctgtgtactgttaccagtgagttttgtaccttcaaatgatttcttattgctcattatcactctttcctttctgattaaagaagtctcttttgcatttcttgaaggacaagtcttgtgtgatgaaatcccccaacttgtttgtcaaggaaagtattcctccttcatgtttgaaggatgtttaaattggatatactattctaagataaaagctttttatttccttcagcactttaagtatgtcatgccaccctctcctggcctataaagattccactgagaattctgccagatgttttggaatgcccttccatgttatttgtgtgtgtgtgtgtgtgtgtgtgtgtgtgtgtgtgtgtgtgtgtgtgtttcttgctgcttctgtcgcccaggctggagtgcagtggcttgacctcggctcactgcaagctccacctcccaggttcacaccattctgcctcagcctcctgagtagctaggactataggtgtccaccaccatgcccggctaatgttttgtatttttagtagagatggggtttcaccatgttagccaggatggtctcgatctcctgacctcgtgatccacccgccttagcctcctaaagtgctgggattacaggcgtgagccactgtgcccggccaaggggagtttgattattaactatcttgaagtagtcttatttgggttaaatcttcatggtgttctataaccttcttgtacttgcatatgtatatctttctctaggtttgggaagtcgttttaatatccctttgaataaattttctaccctggtctctctgtctctccttcctcttcaaggccaatattgcttaggtttgccattttgaggctattttcctaactcttgtaggcatactttattcttttatgttctcttttcttttgttctctcttactgtgcattttcaaatagattgtcttcaagctcactaattatttctaccacttcatcaattcttgttaagagattttgatgcatttttcagtatgtcaattgcatttttaatctctggaatttctgcttgattctttttaataacgccaatctctttaatttatctaatatgatgctgaatttcttctctatgttaccttgaatttctttagtttcctcaaaacaactatcttgaattctctgtttggaaggtcacacatctgtatctctatgggactagtcactagtgccttatttaatttgtttgtttaggttatgcttttctggatgactctgatgcttgtggatgtttttcagtgctaggcattaaagaattatgtattacttgtagtcgtcacagtctgggcttgtttgtatccacccttcttggcaaggatttccaaaacacttgaaggtactttggttttgtgatttaagtctttagacacagcagctgtatctgtattagggcacaacacaagcccatgaacaactatggctcttgtggactcttataggtactgcctaggtgatctcaggtaagatctgggataattctttggattatcaggcaaagactcttcttctcttcccttactttgtcccagacaaaaggagtctctgtctctgtgctgaacttccaggagctagggctaggggtgacacaagtacctctatggtcaccaccaccaggactgtgctgggtcatacctgatgcaagcacagcactgggtctcacccaaggcccacggtgaccactgcctggctactgcttctgtttattcaaggcccaagagctctataatcagcaggtgatgaatccagccaccgttgggtcattcccttcagggtgaagagatccccccagccttgagtgggtcctgagatgctgtccaggagccaggacctggagtcagaaaccttagtaatctacatggtgttctattctattgcagctgagctgcaaccaggacataagacaaagtccttcccactcttccctctcctttcctcaagcagaggaatctcttgccattgctgccaccacagcatgcttgtgaaaagtactgcctggctatcatccatgttcactcaaggcccagggactcttcagtccaattgtggtgaatgctgccatgtctgggtctctcccttcagggcactgggttcccttctggcccagggaaggtccagaaataccatccaggagccaaggtctggaataagggaactcaggagcctgcttggtgctctactccactttggccaagctggtgcccaagctacaagacaaagtccctttcactttttcctctccttttctcaagtggaagaagtctctatccataaccatcatagctggtaatgtactgtgtcacagctgaagccagtagagctctgagtttcacccacagcctacagtaaggggctgactccaattgctgattattcagggccccagggctctttagtcagcaggtgataaatctttccatgactgggacccttccctcaaggtagtgagttcccatctggttcagggtgtgtctagaaatggaatctgggagtgagcgcctggaacaagtgtctcaagagctgcctggtaccctatttacaagagactatgtgaggcctatcgtatgtataccccctttgatcccaacagccctgagaatcagcgcgtgattaacatggctttagttagtcaaagtgcagaagacattagaagaaaactacagaaacaggctgggtttgcagggaggaatacttcacagttattggagatagccaaccagttgtttgtgaatagagatgcggtaagccacagagagaaccgcagagagagcgaacgccaagcctggcaaaacactgacctactagccacagctattagaggggtctccccaaaggggcaagagaaggggggggcccaggaaaaatacccagtctggccatccaggcttgcagcataaccagtgtgcttactgtaataggacattggaaggacaagtgccccagttaaaaggaaaacaagctgactctgagcaggaggcctcagacaaggacgaaagggccttgttcaatgtggcagaagagttactgaatgaaggggactgggctcatatgcccccaaagagcacatggtcaggatgacagtcgggggcaaggacattgagtttcttgtcaatactggtgctgaacgttcattagtaaccaccccggtcgcccccttatccaaaaagactattgatataatcggagccacagggatttccgcaaagcaagctttctgtttgccctggacctgcactattagggggcatgaagtaattcaccagttcctgtacatgcctgactgccccttgcctttactgggaagggaactacttagcaagctgagagtcactatctcttttacaaagcacggctctttacagctaaagtttcctggaacaggagtcatcatggcccttacggttcttcgggaagaggaatggagactcttctaactgagccaggctaagtggtggccaagggtgtgggtggaagacaatcctccagggttggcaatcaaccaggacccataccaatagaagttaagcctggggcccagctggtcaggcaaaagcagtacctggtcctcagagaagcccttgagggcatccaggtccatctcaagcgcctgagggcctttggaattatagtcccttgtcagtctccagggaacactcccctcctacctgttcccaagacgggtaccaaggactacagtcagatacacgatttgcacatggtcaaccaagctatagtgactttgcatccaacggtacctaatccgtatacattgttggggttgctgccagctgaggatagcttgttcacccacctggacctgaaggatgctttctttagaattagactagctcctgagagccagaaactggttgcctttcagtgggaggatctggggtcaggtgtcaccactcagtacacttggatctgtctcccccaagggttcaagaactcccccaccatctttggggaggcactggctccaggcctccagaagtttcctgccagagacctaggctgtgtgctgctccagtaagtcgatgacctcctgctgggacaccccatggcagtcgggtgcaccaagggaacagatatcctgctctgacacctggaggactgtgggtataaggtgtccaagaagaaagctcagatcagcagacagcaagtatgtaatccgggatttactattcgacagggagagtgcagcctgggatcagaaagcaagcaagtcatctgcaacctgccggagcctaagaccagaatgcaggtgaaagaattcttaggagctgtagggttctgcaggttgtggatcccaaactttgcagtactggctaagcccctgtatggagtcacaaagcggggagacaagtaacctttcaaatgagggtcccaacagcaacgagcttttcatgagttaaaagaaaaactcatgtcagcctcagtcctggggttacctgatctgacaaaaccttttatgctgtatgtgtcagagagagaaaaattggcgtttggagttttgacccagactgtggggtcctggccaaggccggtggcctacctctctaaacaactagacagggtttctaagggttggcccccatgtttgagggccttggcagcaacagccctgctagcacaagaagtggataagctaactcttgggcaaaacataaacataaaggccccccgtgctgtggtgactttaatgagtaccaaaggacatcattggctaacaaatgctagactaactaggtaccaaagcttgctctgtgagaatccctgcataaccactgaagtttgcaacatcctgaaccccaccatcttgctcctgatatcagagagcccagttgaacataaccgtgtagaggtgttggactcagtttattctagcaggccagacctccgagaccatcctcagacatcggtagactgggagctgtacatagacagaagcagctttatcaacctacaaggagagaggtgtgtgggatatgcggtggtaactctggacgctgtcattgaagccaaatcgttgccccagggcacttcagcccagaaggccgatctcattgctctaattcgcgccttagagttaagtgaaggtaagactttaaacatctgcactgactctcagtatgcctttttaactctccaagtgcatggggcattatacaaggaaaaaggcctgttgaactctggggaaaaagacataaagtatcagcaagagatcctgcaattattagaggcagtgtggaagccccaaaaggtggcagtcatgcactgcagaggacaccagcgagcttccacctccattgctttgaggaacgcccgagctgactcagaggctcaaaaagcagcatccacccactaccaggcatcagtcacagccccctgctccctcaggcacctgaccttgtacctacttattctgaagaagagaaggactttctccaggcagagggagggcaggtgatagaagagggatggatctggctttggacagaagaatagccgtgccacaactgctaggagccacagtcatactggctgtgcatgagaccacccacctaggccaagagtcacttgaaaagttgttaggccggtacttctacatctcacatctgtcagcccttgccaaaacagtggcatagcagtgtgtcacctgccggcagcacaatgctaggtaaagtccaaccgtcccgcccagcatacaagcttatggagcaacttctttgaaggtctccaagtagacttcaccgagacacccaaatgtggtggtaacaagtatttgctagttctagtgtgtacatactctgggtgggtgtaggcctacccaacaggaactgagaaagctcgtgaagtaacccgtgtgcttctccgagatctcatccctaggtttggactgcccttaagaatcagcttggacaacaggccgtcgtttgtggctgacttggtacagaagacagcaaaggtattggggatcacatggaaactacataccgcctactgaccacaaagttccagaaaggtggagcagatgaactggactatcaaaaatagtttagggaaagtgtgtcaagaaacagtattaaagtgggtagaagctctccctatgatattgtttaagattagatgtaccccttctaaaagaataggatattccccttatgaaatattgtatcataggccccctcccatactacgggactcccaggaactcctagaaagcaaggtgaaattgagttacagcgacagctacaggctccaggtgccctgcatacacatagaccaggcatatatcctagtttggggatgtgtctcaattctttgaaaaaacttaaagcctggttttattacacaatttgattttgaaattcttaattactcactgaatataaatatataccaaattatgaattatttagttttcatgcatggaaacacattgtagaaagaacatggacattgatgttagacacttataattctagatctccctaacttgttaatatgtaggtattaacacacaggttaatatgtaggaaattaactcaccaatctgtttcctctcctgcaaagcaaagctaatgtaaactttgtaggttgtgattatcagacatgtaaggcagctaatgcagtgcctggtactgtctaataagcatttggtaaatgggagttattgcagaactttgcagatgttttaataggcaagtgtcattgtgaatttcaaagagtggtctagagtttatggtacttccccaacttaattcatttaaagaatatcaattaaaattttgtcaaacacaaaatatgaggctgcttgttttctttaggagtaaagcagcccaaaggactataacatcagaacttattgaccacacacttgccctatcaattttaaaaaaatcaacataacgtgaatgcagttttcatagatgaaaaatttcataataattgtaaacaaagacaaggtgttaccatattgtgggatattttatgtataagtaattatgctctgtaatattttacagcccatttaaacattttatatgttaatatcatttttaaatgctgacttctaaaaaactggctgtataatatgctggcactttgctacctccgcattcgttctgaattaatgtacttcagaaattcatttggaagacataactgcatctttatctctaacatattttaattggttataacaactaaacataacagataccaccaaaaataaataactttatcctgcatcattattgttgttcctgttgttctgattaaatgatcttcttactttaagtatactttaagtattttatggtaacttcttggcagtcataactttctgaggaagagaaagcaaattcataattattatctaacgtgaaatactagaaagtgaggctgatagttcagaaacgtgttttgcttttgtcatattgttatttttcccctttggtgttggcttaaccagtttggccaaatgctgagctttttccaagccaacagtcccaaaatataacctggtgaacagttgccagtctgtcagtcttccagtccagaaccaacttaataacaacaatccaggcaaaccatccccttctcaagcaggagactctgtgggttcttcatttcacaaatgtcaatgccagcttggccctctaatctctcccctcatatggctgtctctctgatggaccttgtttaattagctatttgcctatttctcctctgtcctgaacactttattggagaggatttctgtagcctcccaagtgctcaaataacggttttcagccactgttcattgagaccccattatccttcccaagcccagttggagctaaatcaggcaagacctggggttagctactttgtattggctttccaagtgcatatcttatgtattagagatgcatattttagtgcaaattttagtgcaaactcagatgcaaattttagtgcaaatctacgattcttttagcaatttagcctgaagcaataatgggataagtgtgcaattatccaaatgaagtaatcacaagtgtatgactcataattgcactgtttatatttatgaacatttaaaactatcctggctggatgtggtggctcacgcctgtaatcccagcactttggaaggtcaaggcaggaagatcacttgagcccaggagttcaagaccagtctgggaaacagcaagaacccgtctcaaaaaaaaaaaagagagaaaatttccaaattgttcagtaatagaatgataaaatgacaactatggaatacaaagtgatgccattaagaataattaggtacatttttattgaactgaatatattttcaatatacatttttattaaaaaagttataaaatatgtacaaaatgaagatatatcaataaaaatgaaacacacatatttatatgtgtgtatatgtgtgtatgtacgcatatatatacacacacatgagattagacaccacaacggtactagtgtttatatcaaggtagtaggattatatgtgaattttacaaattttttttcagatttgtattttttaccatgaacattaattacttgtgtaatattaacttatgtaatactttagaacttttaatcatgttcctattcttctttctcaaaatattttataaaagatcacaaactcaaactattctccacatcccacttttgctggcaccccatttctctttcctttatttagacctaatcctcttagaatacctgtccttttttttttccatttccttacttttaaagcagttttcaaattgttctaatcaccatattccattgaagttcttgatgaaagtgatcaataaatatttgtggctaaatatatgtaattaaaaataatttcttgagtctcttggcctcagtgcattgttgacccctctcccccaaacaggtgcttctatgacatcctaaactttcacatcacagcatgcgtgaaacttgaattgattgtttaattttctcccctccaattgaaccataagatccataaaggaaagatacaatcaacttgattcttaatagtaggccctagcccagtgtctcatatatactaggtgaccaacacatatatatcaactaaactaatgaataaataaacaatatattgtttaaaaagaacatgatcatcctgaaatgatatcttgtcattgatattctattctagtttcaggaatctaaataatttaaatgttacccttctcaacgaagaccctataacagttgtcccttttggcaccaaggaccgatttcatgaaagacaattttttccacaagatggggtggggcagtggattgtttcggaatgattcaagcacattacaggcattacatttattgtgcactttatttctattattattacattgtaatatataatgaaaaattgtacaactcaccgtaatgtagaatctgtgagagccctgagcttattctgctgcaactagacagtctcatctaggggtgatgagagacagtgaaagatcatcaggcattagatcctcataaggagcatgcaacctagatccctcacatgcacagttcacaatagggttcacactcctatgagaatctaatgccactgttgatgtgacaggaatcctcctgccagaggatctcaggctgtaacgccagcagtggggagtggctataaatatagacgaagctttactccctggcctgccactcacctcctgctatgcagcctgtccatggcctggggcctggaacctggggaccctgacctatgagataagaaaacagggttcagagatttttactggaaagtaggtacagtgaagtctagttttactacagcttaatagagagaggaaactcagcctcagaagggatctatcaattttctaaaatcactggtagaaatagtaaagaatttggttggtttccctctcccattcccaatctgtgctcctatcaatcaaatatgttacataagcttaacccacgcaccagaagatggaaaaacaacaacaaaaacacagggctgttgagatttattgaacatagatcacatcaaagacatatagctgcaaagaatctaattaaaatttgttatttcagctggtcagccatattctttctgtacaattaggggttgtgattttatttaaaccaagttccaatactccctcccactcccaggtcactgacagagcagcacttggcaattgggaggagaatatagacaacacttccctcagcattctttctgggatggctgtttgggctaaaatagcagcctctgcttcacatatgttatatctgtctatatatttaactgctgcagagagggatttcctctttatgatttgaatgttagctgattattgagtatggaagaaatggtgctctctggagtaactatacctatttttcccatgtgacacatgtgcttggactgatgatctttcagtcttctttaatgggtttctcaaacaagcattataaagtgaaaagaaaagtgcatttggctttcttcaaaattctagcaatttgttctatggcacagagtgtatagagcgaaatgctatgaataataggactctattcattcaagatgaaagcaggattagagttttgttctctgactgtacctctgttacttagattgctaagaaaagctttatttgttaaatgtagaattcataaagataatgtttactaattcaatataattcataaataggagtgtaatccattctgtcctcattgtacatgaagggaagattctctgcacaggaagctcacacttacattaagacaactatggacttggccttgaaaataaaataacttatgttctctaaatcatcatagtgtttgtttatatcattattaactatttgaccataacaatttataaaggcaaagggactgttttcatttagtaacaatttagattacaggtagacaatgccaaatcctcgtttttgttgttgtttttgttttgttttgtttttaagaaaactgtttattcttttttaatgacaagaaactggttgaatgacagaaatgttttccttcaacgggtcaaacaacaccatctattgtaatatagttaacactgggtctccctttcaatggaatatgacacagaatttcacacactcttaggaagaaagaaaagacaaccttcttcatattgttcagcatctttctttatgttaggcacttgtattagtccattttcacactgctataaagatactactggaggctgggtaatttataaacaaaggaggtttaattgactcacagttccacaggctggggaggcctcaggaaatttacaatcatggcggaaggggaagcaggcaccttcttcacaagatggcaggagaaagagggaggagtgcaggggaaagcacaacttataaaaccatcagatctgataagaactcactgtcacaagaacagcatggaggaaactgcccccataatccaatcatctcccattaggtgcctccctcaacacatgagaatgacaattagagatgagatcaggtgcggacacaaagccaaaccatatcagcactgtactagacagggtgccttactttagctcatgtaatgttcttaataatatattaaataggcattattaaccctgcttttcagatgaacaatttgaagttcagtaaagttatcagccaacattgcccatttagtaagtggtaaggaaacacacagaaacacacatacatacacacatttcttccttttaactggaaaatttgttgtctttgggctacacaggttttaacttagggccacactaaagataaaatacagggaaggagaaagaaacatacttaatgtgaatgcgcaggggaaaaaacagaacaatgaaagcctttatataaatggtttcactttgttacatagtctgactttctaataagtgttccagtgggtcaccaccctctgcagaagctcctgagctggatgtgtaagcttgatgttaaaaacagggtgaggaagtgacacagcattaatcactaatcaacttcttttgctcctgccttttcttcttgtttatcattatattatttctgctatgaatttttttatattgttatttttaatgtacgtaatattttatctcctgagggtattatagactgttgtaaaaaatcttttattctgctctctgtattgtctctgtttctcacaagctcatttgttttacattggagaatttcctccaatgtatgttgatccttggctgatggtgcatggttcagagtaaaacataaaagctgaaatgaaattggcaggaggacacactaatgagggcactcattgtgtacctaagtcaactagagagtgattagatagtaactggtattttttttttattggaaggcctttccacaattgaatatctataagcatttaattttgggcctgagcctgagggtaatcttcacctctggaggtagacatagtgtaatcctggatgctagtgttttttttttttttttcagctcaataaagagaaagaggctatagtagttctcagcactatgcacattgactttcaaacatttcgttgttatcagcatggtatatcttctctattctcagctgtccaaacatctctgctaagtaaactccattacattttggaaatgagaataagtagtcacttgactaggtggaatggagcaaaatatctggaagtctaatatttatgtatccaagttttctatgatcctcttttcagccttgccttacctttacatttcagagattcttaatggccctaatctctgaggctttctgagtttaattcagtttagttttccactttgttgatctctccctatcctcctgccaggtttggatatctgctttcttctgtcttctgagtcagttcctacttatccatctgctcttaacatcctataacaaagacaagttatctctaagcaactacgttttcttcattcctggacacagagctggtttatatttctgagcctgccttatagcgatgcaaatgagtcgtggtaatgaaacacaagggaggtaatgcatgccatgcaaaggtcttgtgcagtgtggcctttgacatgcaactgcattctctttcactcttccttctgaaataattttggaagccctacataagatagaggtgtgctatgggtgaattgtgcaattgtgaatcgcgccccctccccgcagaaatatgccgatgccctgtattagtccattcttacgctgctgtgaagaaataccagagattggtaatttataaataaaagaggtttaattgactcaagagttctgcatgcctgggttggccttaggaacttacaatcatggcagaaggcacctctgctcagggtggcaggagagagaaatgagtgctgagcaaaggaggaagccccttataaaactatcagatctcatgagaactcactcactatcacaagaacaggatgggggaaactgccaccatgattcagttatctccacctggtccctcccttgacacgtgggtttatggcaattcaaggtgaaatttgggtggggaaacagagccaaaccatatcatgctctaaaacccagtgtgactgtttcggatatagggactttagaatgcagttaaggttaaatgaagtcataggttggttccctaatctgataatactattattcttatttaaaaaatttaaagcactctctctctccacttatgtgaggacacagcgcaaaggtagttgcttgcaagctaggatcctttaacagaaccatgctgatgtcctgatctcaaacttctgtctccataatggtgagaaaataaatttctgttgttgaagacatgtagtctgtggtattgtgttatggcagtctgagatgaccaatacaaggagccacagatagaaggagtttgtatctctgaatcatttcttggagaattgccagccaagcaggaatatccattcggactttgtataagaaaaaaaaatagcttctattgtgatgtgccactgagaaattggaacttacctacctagtataacagctcatattactttaacaatttacatttctcattgcctgtggtctcctatctatttctgtcattcttgtggattttatactttactattttattgtcagttagaggacttttgagagggaggggcagtgagcatgtatgttttattcactattcaccttgtgttactaaatctattcagcttatgaacttttaattttgcttccctgttttggcagggtgctcagaccttagacttaatgaaatcctttgttttttagtttgttgattcctttagcaaaatctcttagacattatcatgtattcattcatttatctcatttctgactgcttcatgaccacacagtatgagtaagctctagtatacaagattctatctatgagacacacagtattatctttcagcttcatttacgatatttacatctgttacatttggtgcactggagtgaagagaagggcgttttatctccaagatcatattaagtactagggaatccaattctgataagatgaaaaatgatgattaaaatcatgtttccttggagcatgtctcactctcagatattaaacattttctcagtttttaatgtcttctcacaggggaatttgaagaggtaacaaaagatgtatgtccttgattcctacaggatgtacctccattccttcatactcgtgaaggagagaccacacaaaaagagacgtctgcttccctccctacagggatttgtattgggtactgttcttcttttcttaaagcctatatatttcttaacacctcatggttcaatagccatgcaaactcatagcttacttacttgtcttctttgctaggggaactaatctaattgggccatactcttaatactgaatggcgtcatttttcctcaaggataagtaagaaatgcactggttttcaaagtccatgcatcaggtccacctaaacaaagtctcttggaaatagtaaaattggaaggaggctaggattgtccctgctcttttctagtaaaattggaaggaggctaggattgtccctgctcttttctacttgggattgactaaataagtgagttagaataggcatttgttctgaatcgctttgtcttcaactcagtaaagcagaagccaactatgaggcttctggtccaagctacattctccaatccagcttgttatggtttggctgtgtccccaccccaatctcatcttgaattgtaatccccataatccccacatgttgagggagggagggacccagtgggaggtgactggatcatgggggcattttcccccatgctgttctcatgatagtgagtgtgttttcaggagatctgatggtttgtaagtgtttgagaccgggtgcggtggctcacgcttgtaaacccagcactttgggaggctgaggtggtggatcacccgaggtcaggagttcaagaccaacctagccaacatggtgaaaccccatctgtaccaacagtacaaaattaggtaggcgtggtggcacacacctgtaatcccagctactggggaagctgaggcaggagaattccttcaacctgggaggtggaggttgcagtgaatgaaccgagatcggaccattgcactccagcctgggtgacagagcaccactccatctcaaaaaataataataagtgtttgaatgttcctccttcacatgctcacactctgtcgtgatgccttgtgaagaaggtgcctgcttccccttctgccatcattgtaagtttcctgaggcttctcacaccatgcagaactgtgagttaattaaacccctttcttttataaattacccaatctagggtatttctttttagcagtccaaaaatggactaatacgcagctttaccacaagtttagaaagcttactttaattttgtttttaactttgtgaatattgtcctcattagcttgaacccataagcaagaatacatgaaggcactccaaactccaataaaattactatatttttgtcaaagtcactacctcttgctaaaatcctgatacagaattcctgaaattaacagattcttggtcgggcaaatcttctaggttttaaaataggaaaggctttcagttagtgaaaactatatttagattcaaagtcactgaaaacatagagttccttttgattataaaagaggatcatataatactagagtaggaagaactctgaaagtctattatagttttccttgttcatcgtacacatggggagaagcttttatatacttgatggaaacttcagccatgggtaatagctctgtgatcattggtagtaggctgaactttctccctattgcattggctggctagagaataataaataaaatttttaaaacacctggatttctaaccatgaaaaacctgattgttcaaaaagtatttttgtttccactgccaatctaatgctaagtcatgcaaaaaactgaaactaaaaatggacaaaaacctagatctcttttaaatcataagtaatgtaccctacaaataactccattgtgaaatcccttcttcggaacagatatgctaagtatcctgagaggatggagaataaactccattttgagcttggaaaattatgggagatattcatgaagaaataatatagggatactatcattgttatttataccttttaaaacatgttagaagtaaaggaatcctcaaggaagaaggaaaaaagtagtgctgaagctaggcagtgaagatggggtggtaatgcagatagtgttaagagtggcagtgcatctgaggttgctggggatgaagatggcagttgtagaatgaagcgataacagaatcatttgagaggtggtagtagacatagtatggtaggaggtaacttaatctcaaagtctataacagagtacatatggcttagactgtatccaatcatgtttccaggaaataagcattgtaagtattaaattcaaacacgtttgaaagctaattgctattgcttttggactaccacttaaatgaactcttgttatgggggattggtgataagtgaagatttcaaattgctgtatacagtatgatataaatcaatgatatagaaggtgatctataaaaatgttcagccaacgatttatagttttatagcaaaacatagtattgctccatgtttgaaattgattttctttcagcaattcttgtttctcaaatcagtaatgtgagcaagtatgtggtgtcactttgataatgtttaaaatgcctgttcccattcttcaaatgacacataaaaagtaaaaataaacaagggattatttctgacatgtttgacttaatttttgactctgggttcaatttaccaaaggaaaaatcatataaactagtgcatagccttgtgttgcggtggagggggtaatttatttgactgccatttgtgctgtgtttctttggacaatggtccacatatacaaaaaaattgaaaagcattctgctgtcagtgtagatgggcatgagcctctaaagaccttcattctcccaaatgtacttaagtgttataaaaagaggataatagcatgaacatttgctttagtgtctatgagccagacattggtttatttcatttaacctttataaaaagtttttgatacaaataataaaataataataacatcccttttgaggaaccagattaaaaagtgtttgtcaaaatcagaatatgcattctgttctatctaaaagtatgctctatattccttcattgtgctcataatgggcttaaaaataatgaaacatggatgtaatttcaataaacagcactgaaaagactttataatgtatatcccaaactgattttgcccttgatgtctatctcattttggtttcatttgtgatgaattattaaatgaatgtattattatcttgtttacctcttttatatagttaggttaattttggattcttatgattaattcagaggtcacattcaaaataattaacaatcaatacagctccactgcaccaacccaccactgagagtggaggccagttgtaaacaatctttcaggagggtgtcacagtgtacagatatgtatcagccccaaagttatgttctcttttactgacacattaactcttttgttttactatatatttttaaaagttctggacttttaaataagttatttcttgaggtgtaatgtgtatacattataaaatcgacttttaaatgtatatttcaataatttttgacagagatgcgcccttaccgtcacaataaagatatggattatttctaacacatataggcttcttttaaggaaagaaacaattatagatgaattcagaagatgatgagagaacaattactaattataaatcattaagcattcaattattgttaacacccacattggtttctttgttgcaggtacaaaaatgattagttttgaaccttctggctctttctttacattagctaggtatgaaggcaagttagaagttgggagaaggatgagaggcattaataatgcatagaagtcccaagtgctatgttttaatgtactaatgcttctacaaatattaaccttattctaagaaaaatacgtttcagataatgaaagaaacctggtcacagagtaaaatgactgctaattgcatttcaagtagtttagccaaatttttggtaatattctacatcatttccaagttatatttatttagccccatctggccaagcatataaattagtttctgcattactgtacattcgtaactttcaccactcccatttcttacttatttctctctttttgtctcacgctcttccacacactctttctcttgtcctctgaatagggtctacagtataagccatttttcagccctagcatattcctcttggcatctccatgctcaacattcagtagggagcatggctgtggatttcttaaggatgttggaattctgtgagcaatctgccatcctcccccaattctcttctctcaagttcatttggcttcaagactatggtatgatgagtttttttcatttttaaggtaaaaactcctgtgcaatatttatggactgtttatactatacagccatcatcccctccttttaatttctgtgctagaaaaatgcacttttttatccttcttttaagaatctggaggtaaaaaaagaaacctgccgaggaggaaccctaaagtctctaatatctcaagggaaatactctgcaaacatccttaatgtttaatagatttcagccttttcatttctcctaagtaatatgccatactccactgggcctcctgagttttcttctttgttgaccttgctaattatattatggcttttgccatctacctgtaggaattcattaaacattaaacaatggcatttggtagacatttagaagggatggggaagtggggagttgattcccttcttatcctttcacaagagatgcatatgtaaatcctgtctcaggcagaacctaatgaattcaagccattggaccattattttcatttccttttcagtgttgtgggtaatatccaactacacacttattttaaattaaataccttgttatcattggagtgatttcataactctcaaactacatatgcaggctttaaacaccctagagggtaagctttgatatacgttcaaatatgaaaacaattatcaatgatttaaggatttccaaagcaaccaaaaatcaggaaatgagtaaactttgaaaacagtcttaatacattccagaatgttaaagtttgaaagtgctgtttgtccccatattctcagtctgagtttctttctactttaacatatccctaaacacaactaataatagtgatcaaatgaaatatttcaaatgtattgaaaataattttatttcaaagaatactatatagctatttgtattaatagttcttcctcaagtaccgctaagagtcaggggagaatagctttgttttttattcctactgaaatagcaagcagacataatcaacttcatgatgatcactccagaagaatttttctatgtggtctaggtatgttctttcatttatataaatcactttttcatctgcagtccgagtcattccaccttggtaatgggaaatagcctttcctattgttggttttgtttctgcaaaaaggccttcatgacaaattatttaagacaacttgtactacacatcaaagtaggggaaaattatttctttcatagcactaacgttctggagaaggtcaaaggggttgttggtaaaatataagggagaatgctttactctaaattattgtagttattcaaatacaatattctgggaaaggataaggaggatcaaaccttttcacagttctttaccaataaataacatatgataatggtgatgctctgactactgaaatactaaatgagcagggtagaattcagcattttttaaattcttaaatatcttttttcctcctcagacaagtgtgaaacaatcaccagtcaaagaacacacaaaacagaatcagatcttaggccaaaagcttacaagggaatatgattagaaatgctattaaaaatgttgatcctatgttctaagttttgctctcacaaatcaatagaaataaaactaaatacaacaacacttataattttacttaaatgtatgcatgaatattttcaagaaaaaagagagaagataatccggtttatttgactgtctattatatgctaggcgttctacaaggcagcttaggtacatgattttatttaaattccacagcaacccacataagaaaaacagtctcagaaaagtcatttaacctacctaaagtcagatggaaaaatcaagaagagaaatagcatttatttcaaatattcctgaattcaatgtctcaattgttgagttattcatattggtttttttttttttcagggtgagggggttggcagtaggtaaaggaactcttaggaactgcgtttagcatagattgtagacagaatgcctcaatcaaactccttgtcctcctcgccttcttcctccttttcctcatcattattttcatcaccattattataatctatatttattgagtgcatataattaaagtgttatgttttcgaagtactatttttcatgtttcttctaagatatcctttattcttccagttatcattattgctatcctgccatcaatttagggaaatgtcctattacttttcttttacatccattataccttatatatgattctatcactatcttgtaacttataactcagttattaaagtcacggtttcaaagttcttatttgcgttgattttatgtccacagaaaaatttaatcaatgaaatactattaaaactagcctagttgaactctggagtgcccagggctttttcaagtgttggatacaaaggtaaataaacatgttatctatcttccaggaatttaattcccaattaataataataataataccttactttaatatagacctttatagctaatgaaacaaaatatttcataatgagataatttgcaaaaatatatcaaacctgtaggtgtatgttacttgggggagaaacctaaaaacaaaatttaatgagatagccagttttacatctgaaacaacaacaaaaaagtctatgaatgaggttaggtattacagtaaacagaaaaaaataaaattttcccccagtcttttaggaatatgtctttgtaattttttatgaatccggctggagaaactgggttataatttaagggttattggaggaagactgcaaaagaagaaaacgaaaaaaattcaggaagaataaggtttgaaaaaagtgattgaaatagagagaagtgaaattgggaggacaattttgatgatactacggtgactatagctacatttgaaccagttaatttaattttttcatagactttgatgcctaactatttctctctctctctctctctctctctctctctctctcacacacacacacacacacacacacacacacacaacttgggatgagaatagtgatttgctgcttcggctacacctaattatattatcttagagctttttaaaatacgaatacaaagactcaaccacagatattttgaacttactgttctgggatgagattcagatattggtatgtttttaaatttctttaggtagttctaatgagtaactagggttgaacactactcctttagcatttattctcaaatgtcggtgtgcatcagaatcactggaggactatttaaaacccagaatttctggcccattacatctgtattggggaccaatatttgacatttccaaaaattccaaagtgttgctgatgtgaatggtccaggtatcacattttaaagtgactggttaaaaaacaatatctgtaaattaccttgggcagtatagccattttcacgatattgattcttcctacccatgagcacggaatgttcttccatttgtttgtatcctcttttatttcattgagcagtggtttgtagttctccttgaagaggtccttcacgtcccttgtaaggtggattcctaggtattttattctctttgaagcaattgtgaatgggagttcactcatgatttgactctctgtttgtctgttattggtgtataagaatgcttgtgatttttgtacattgattttgtatcctgagactttgctgaagttgcttatcagcttaaggagattttgggctgagacaatggggttttctagatatacaatcatgtcgtctgcaaacagggacaatttgacttcctcttttcctaattgaataccctttatttccttctcctgcctaactgccctggccagaacttccaacactatgttgaataggagtggtgagagagggcatccctgtcttgtgccagttttcaaagggaatgcttccagtttttgcccattcagtatgatattggctgtgggtttgtcacagatagctcttattattttgagatacgtcccatcaatacctaatttattgagagtctttagcatgaagggttgttgaattttgtcaaaggccttttctgcgtctatggggataatcatgtggtttttgtctttggttctgtttatatgctggattacatttattgatttgcatatattgaaccagccttgcatcccagggatgaagcccacttgatcatggtggataagctttttgatgtgctgctggattcgttttgccagtattttattgaggatttttgcatcaatgttcatcaaggatattggtctaaaattctcttttttggttgtgtctctgcccggctttggtatcaggatgatgctggcctcataaaatgagttagggaggattccctctttttctattgattggaatagtttgagaaggaatggtaccagttcctccttgtacctctggtagaattcggctgtgaatccatagtttcaatgccatccccatcaagctaccaatgattttcttcacagaattggaaaaaactactttaaagttcatatggaaccaaaaaagagcccgcatcaccaagtcaatcctaagccaaaagaacaaagctggaggcatcatgctacctgacttcaaactgtactacaaggctacagtaaccaaaacagcatggtactggtaccaaaacagagatatagatcaatggaacagaacagagccctcagaaataatgccacgtatctacaactatctgatctttgacaaacctgagaaaaacaagcaatggggaaaggattccctatttaataaattgtgctgggaaaactggctagacatatgtagaaagctgaaactggatcccttccttacacctcatacaaaaatcaattcaagatggattaaagacttgaacgttagacctaaaaccataaaaaccctagaagaaaacctaggcattaccattcaggacataggcacaggtaaggacttcatgtctaaaacaccaaaagcaatggcaacaaaagacaaaattgacaaatgggatctaattaaactaaagagcttctgcacagcaaaagaaactaccatcagagtgaacaggcaacccacaaaatgggagaaaattttcccaacctactcatctgacaaagggctaatatccagaatctacaatgaactcaaacaaatttacaagaaaaaacaaacaaccccatcaaaaagtgggcgaaggacatgaacagacacttctcaaaagaagacatttatttatgcagccaaaaaacacatgaaaaaatgttcaccatcactggccatcacagaaatgcaaatcaaaaccacaatgagatatcatctcacaccagttagaatggcaatcattaaaaaatcaggaaacaacaggtactggagaggatgtggagaaataggaacacttttacactgttggtgggactgtaaactagttcaaccattgtggaagtcagtgtggcgattcctcagggatctagaactagaaataccatttgacccagcaatcccattactgggtatatatccaaaggactataaatcatgctgctataaagacacatgcacacgtatgtttattgaggcactattcacaatagcaaagacttggaaccaacccaaatgtccaacaatgatagactggattaagaaaatgtggcacatatacaccatggaatactatgcagccataaaaaaggatgagttcatgtcctttgtagggacatggatgaaattggaaatcatcattctcagtaaactatcgtaagaacaaaaaaccaaacaccgcatattctcgctcataggagggaattgaacaatgagaacacatggacacaggaaggggaacatcacactctggggactgttgtggggtggggggaggggggagggataccattgggagatatacctaatactagatgacgagttagtgggtgcagtgcaccagcatgtcacatgtatacatatgttactaacctgcacattgtgcacatgtaccctaaaacttaaagtataatttaaaaaaaaaaacaaaaaaaaaacaagatctgtcttggtgtattagtcaggtttctctagagggatagaactaataggatagatgtatatataaaggggagtttattaaggagtactgactcatgcaatcacaaggtgaagtcttgagaggtgaggccagctggacttcctgggttgagtggggacttggggaactttcctgtcttacaagaggattgtaaaatgcaccaatcagaaactttcatgtcttacaagaggattgtaaaatgcaccaatcagcactctgtaaaacgtaccaatcaacactctgtaaaacgcaccaatcagcaggattctaaaagtagccaatcgcggggaggattgaaaaaagggcactgtgataggatggaaatggaacatgggtggggacaataagggaataaaagctggccaccccagccagcagtggcaacctgctcacgtccccttccacgctgtggaagctttgtccttttgctcttcacaataaaccttgctaccgctcattctttgggtccgtgccatctttaagagctgtaagactcacagcgaaggtccacggcttcattcttgaagtcagtgataccatgaacccactggcaggaacccaatctagtctttccacattcttctgcctgcttttgttctaaccttcctggcaactgattaaattgtgcccatccagattgaaggtggatatgcctttcccagtccactgacccaaatgttaatctcttttggcaacaccctcgcagacacacccaggaacagtacttcccatcttcaatccaatcaagttgacaatattaacccccacacttggctagcaggagttatttattaattaactgtgttcattcaaaaataatggagtgtctacaatgtgtatggtgtggtgctgagtggtagatgaataagacaatgactgtacaatcaaggagcacatggtcttgacataaggtctggtatcaattttatgtcaaaaagtcactaaaatttcactattggagaacataaggatggaagattttgatttcataatgcctttgagctctttcaggtctacacttacatgatttcagtatcaagttgggcaataggataggagataagagaatcaagcaaaggctttagactgagaagtccacactacttggacttcctgggagataatttggactctggtgaattttatcaacaaaatcaatatatacatcacatgtttgggtggattttgttacaaaattcctcattccactaagaacattcatctttttataatctaagaggtcaagaagttctgactcatttgtgattccacatagtgttgataccctcatggtttaggagtgaatttcttctatatcttcctgaagacacaggtttagcactgtcttattattaactattctgatttagctgtaaagcgttaaaacagattctatcatacccagaaaatccacagagaagtctctcattcatagtacatggtctacctgtaaaatttcttcctaagtagtctgagagatttatttcttcattctatagaagaaaaagatgtgagagaaatatattgtggaattttggggtctgtttgtttagtttgtttttttttagataaaggcacacaaatatactgttagattatagtactcatcatctgtgataagcattactgatttgtgaagatttttggctataattatcagtaataaaagtagtaaatttatatacagattacatgccagcatcttttcaagtcctatgacactacaagaagattcatgatgtgaacttgtttgtcttcttctgtggatatttactgccagaaagcagcaatcttgaacaccctaaaatggcaatcacaacctccaaaaatatttacttttttttcaaaaacagattactcctaaaagagtgcataatttagttacagatttttttttaaaaaaacaaccaaacaaaatctgatcctgagaaggtaagaaactgagaatgtctacatatgcaaagtgaatgaagaatttaatcaatcactttgttgttttatccctcaagcattggtattaatgaaaaatgtggagtcttctgagaacggagctagctgattctgttgcttcatcagtctgataaacaattggttgtgtatttaactgtcttccttgaatttaattcagagtggcaggtaaatttctcccttgtaaagtagccagctagggaaatcattttggaaggagaagtaactgaaaacatcttggagaagcaaagaaaaataaatcttgagatcacataggaggctttgaaacatgggtaaattcttggttgaagaacatttaaaatgctactcaaggactctgcaaataagatcacttggatttgtacatgaagtttactgactgccaagacattgtctctaccttctacaaaatagcctgctccacttaagaaacaaaaccttggccgggtgcagtggctcacgcctgtaatcccagcactttgggaggctgaggtgggtggatcacaaggtcaggggatgaagaccatcctggctaacacggtgaaaccctgtctctactaaaaatacaaaaaattagccatggtggcacacgcctgtaatcccagcctactcaggaggctgaggcaggagaatcgcttgaacctgggaggtggaagttgcagtgagctgagatggtgccattgcactccagcctgggcaacagagcaagactccatctcaaaaaacaaacaacaacaacaacaaaagaaacaaaaacttgagtgtcctcattttacactttgtccaagaggaggttatctgctttctacacatgtgaaataagtatgtgcagttgttttcctttttgttttgtttttgttttttgcttgttttctcatcagagactcatttgaaaacattcagaattaattctctaaggaaatcagaaaaccactgtctggaataactccagtccctgaaatttgtggttgttctttgccataataagtggacagactgtaatattaaaatatgcatgttagttccaacaaattgtagaaattgaaaggtacatgtattacagatttacactcaagaaaggggcccagaatcgtattgttttccatttctttttgatgtggtactagcaatcataccacaccagattataaaactcaactttaaagaattgtccaattgagactttttgtcacctaaatagttcagtgtctactcaagttaaaggttttaagtattgccagtttacatctttattgataaagaacttaagtatagtctcaggtaagaggctaatctttctaaaagatatatctatttttcctaaagtataaattcagcagttttctggacatactctttacattgtattttggtttcctttacaaaaaattgttaatctgtgtttctcaggacagcacattactgagaaagaggcaaaatttaagcaaatagattagtactgttattagtaccatatggaggaacgtgttaagaacataatgggattgtttctagactgtattcatcttgctgctgtgttttactcagcttttgactctgtacagcaaccaatgatggaacaaatgatataagctcaaaatgtgctcctgggtaaagatacttccacagagtataaacctcactaaaactgtaagagccagtcactattgatgagcaaattgagtatttacatcgtttgagacactggtttataaaatgtttatggcttatcttgtcgccttcttaagaatattggttatgttaggtacagaaaatcatatttgtcagatcaagattcaggaccaactgctatgctgacagaaagatattacttataatccaaactgatgatagttatactgtcttaacttaaaaatactggtggtaatttaatatgactaaatatgacttagaatctgtggttcagaccaactctttgaaaacagaaatcatcccttgggcagttgtatttcactatttatataacttagctccaaaaattctacataatgtattaactaattcagttacatataatcaacatttcctagataattcgccaggcatttacattgcaaaataattgcatgattcctgtatgtaatattaagacatttctctagtcaggacattttcatgcagcctccttgatatgattttcatatacaaatagttttatgaatactaaaagcaagtcatgtcatttttgctattgtcaaatagaaagaaaaaaaaaatgctatcttaccaaaagccaaaaactaaggttcctcagaaatacagttgtgaacaaagtctttttctctatgaaatttaccttttcctaggaaaaaacacctatactaaaaattacataatgatttaattttcactgtcatgcaggctatgaagggaaaatgcagatttctaatagaaatacccgatttctcttgggggtcaaggaaaggcttattgaaaaagtgatgtccatgctgtgctcaaaacaatgaaatgtagtaaactatgtcaaagattggtgagatcattccaaatacagaacataatgtgtgagaaatctgaggcactaggaataaaggatcattcaggacattgaaaaaaaattgaggcaaggaaaaaataggaaacacaaatgagtctccctagagaagcagaacccagatgatgtagggatatagttctatactgaggattttggtctatattctaaaagcaatgggaaaccattgaccactttaagtagagaagtaacatgattgaagctgtgctttgggagaaaggtagagcatacgaatttggaaaacaaattgggagaaattctaagtaattatggtaagagcctaagagagtctggattgagtgttgacaaaggattctgggaaaagtaggcatatttgagcatcaaccatctacagaaattgagtattggtgtatatgaaagaaggattcttgaatgattgcaaggcttccttcatgagctgttagatgaatgactggactgtgttactcactaatattgttgcagaagcagaatctgtggtggggttgagagactggtagaagagattatgaactcagttttgtgcatgagtttggaattaccttaaaatatctaactgaagttgtcaagcagacatttgggtgtgtggaactgaaactaagaaaggagatttagactggagctgtcttaatatctactacttagagagcactcaccaagtgctgggcatttttctgaagcttaacttatactaattaatcctaataaaaacctattattacataggtaaggattctttcattacaaaatactactcatgtgctttccagcatgcctattgttaccatatttacaaggaatttgatcatattacctttctttttttttcccctgggatgttccccagtaaagggaaagaataaattgcagacctgctgttgacctttttcttcttatccacttactgatgatgtgatgataagcgagttactcaagctctccatacctcagtctcctcttcaccaaactaggtgtaataataattattttaggagacatacctaatattcctagaatggcttataataaacctaaaatctgttgatctataagatgttctctatggagaacatcacataaactctattactatcatagtatgaaatcagaagtttgtgattcattttttggtaagtatgcacaagtacgtaagtgaaattttatgtatattatatatgggtttatgtatgtcccatatgtcctaatgtaaggcagaaaggatgtgggaagctgcaatggcagtttgaatttttctctgtttttcttgtgcattgggaatacttgtgtccttgaggctagaacataggactttttttaaaaaaccttaataattggaaattagagcggatgatgtggcaaggaaatctgaaaagaaactatcagagaaatataagaaaaaacaggagaatgtgatgtcacagaacccaaaaaacatattaagtttatatttttaataattcctgaacctcattccattgctgaacctcactcctgaccctgaagttgtcctgaaggtaaggttgggctacatagatggctagagagagggaatagtgtcggttagagataaggattagactgagtctcagacatattggtaggggtcaggaaggacatgtgctcagagatggggtgaaggaggatgtagtagtttggcaccatcagtgtcgaataatgtataaaccaaagacatgtgcaccacaccagcttagttcagaaatgaatttcaatcatataaagcacaatgtttgctaatttcctaacaattacttgctattctgagtgattttccctctcatactcactaattactctttaaacattatgatggtcatacttatttactttccaataataattttagaatactaatggaatttattttgctttccacttaaaaatctacaggacaaattaatctgcttatgtaaacttcttaactgtggtaattttgtttgattgaatctatattaggcactggactaaaaaggtgaagggaaaatttgtgtccataaaaaatatttcttttttctttttttttttttgagatggagtttcactctgtggcccaggctgcagtacagtgggtgatctcagcccattgcaaccttcgcctcctgggttcaagcgattctcctgccttagcctccctagtagctgggattacagccacatgccaccacgcccagctaatttttgtatttttggtagagatggggtttcgtcatgttggccaggctagtcttgaactcctgacctcaggtgatccgcccatctctgcctcccaaagtgttgggattacaggcgtgagccaccgcatccagcccataaaaagatttcttatattcagctgtcaactgtatagttaatcttcaattaaatgttttccttagctgtttcagaaaaatacaatgccataagtgaacctttaaatgatggttttaagataactgagataacataacctaaataaaactagacaacatatttttctggggtataaaactaatacagactaaaaaatttcaaaattacatggaaattaataaagtagaaggtggctattgtaatgggggaggatcaggaatatggtctgtgcacattacattgtaattaaaacaaaagtcatttttatgcaattatgtcaagccttatattttttattaaaatgatcatatcaaaattgctatgtcaaaatggccactttgataaaattttatagcaaactcctagagaaagcaatagtatttattaaagtagcttccatggcaccctagttcttttggtatgctctgagaaataagtattgtgttcaactcattttgagaaatgctacacacttccaccttctcacagattcacaatgcacattcacatttaaaaggtcctgaaaaatatttttaaagccttctaaaattaatctaccccaatatttccaaagttaattggatcacaagactctggatgtatgggtttgtaatggtatttgctaatatttatttagcacgtattttatccataccattatatgaagggctatatgtgcatatttcaaataagtcttaaccaatgtaggctgatgttactattattattgtcacttttcacatagagaaagtaaaacataaaataattaactagttgccaaggtaatctattaacatattaatttagccaacaagcatctgagactgattccaactaagttctggctgaatcctcagggtgatttctcaatcaccacactgtactgattcctaatattccacaacactttttgctacttctgatacagcttttgagggactcagcaatacatttctaaaaaatatcacgaagttgccttttatgtctttcttcactcacatctattgagatggagttgctagagttttgttttggtttatttctcaaagcacagctacttctgtaattgaccctatagtcattgtacactcttggtccttgccagaacatataatttaaaattctccactgcagctgcccaaccctcacctaaagcccagttacaaacagttcaggagaattacctaaaggatgtgaaatccattcagtcttctcagtgttctacaaactggtacactgaattaactcttgtgatcttagagagtgatctctttcgattgattgctctgcattgtattttaatgtaacttataagttacattaaatatgtaacttatacattaaatgaaaataagtacaatctcagtttgcattgaggaatgttattaaaggagctgtacaaaacttacccttggaattagctgacattcctcatttcacacaatgattcatagtaattgtcactatgatttgcacagtgcctgagaagcctcttcagaaaaagaaaggagataaatttgatcgtagttggggttcaataataagaaaccaaatctggtgaaattatggtgtgggtttaggtaggcaacagaaaccaggctgcagagggatggcagtacccctgaagagtcacaaagataaaaggagtgagtcagaacctcagtgctccagggcatttatgtgacacctgttgactgactgtcccataatcttagctactttgatagcaggacattgactgaaatatcactgagacagttgccattaggctcatgcatgcagctcatcttggtatagcacatgatcaaggcctgactttgctagtgtcaaatctgagcaaccactagaacagctttccaaatgaaaagatgaatgattataaatatttgaggaaaaaagacattttttcaggacccaaaattccaatagaagcagaaggagacctagagctaccaagattcattaatataaattgattgtactatattcctggtttggcgaatgctgagccacataaattgaataggaatttatttgcctgttgttaacttcagcacagtgttttcttaaagaaacttcatgggagaaactttctcttaagttttaattccagggcaagtcctgcttctccaaagatgcccaaacttttcctttttttttttttttttttttttttttttttttttaagtctttgtgtgttgtttttttgaaatccccaaaattagtcaacttgactttttggtgtgtatatctctgtaaattttagcacatgtatagatttgcgtatccaccaccacaataaagatacataatatttatatcactcccaaacacatgctcatgctagtatttcttaatcacaccactttttcacccgatcccttgacaagtactaatgctctctattactacattttgtcttcttaacaaagtcatttaaagtgaatcatacagtatgtgacactgagactggtttcttctacacaacaaaatgagattcatcccagttattgcatttttattaccaagtaaaattccttttcatggacataccacagtgtgtttatacagtcacccgttggaggtcattacggtggtctccagtttctgcaatttttaatagagctgctataaatattcatgtacatgtttctgtgtgagcataagggttttttttttctagaataaatacctaggaatgggattgctaggtcatatataggtgcatattataactttaagagaaacatgacaaaatcattctccaaaatatctgaatcattttacattctcactaacacttcatgctttttcagtagttctacatctttgccaacctttgtgttgttttatctttttttttttttttggccattcttataagtctgtcattgtacctcattgtgattttaatttacttctccctgatggttaacaatgttgaacattttttcttgtgcttatttgccattcatataccttctttaattaaaatattttacctactttttaaaaatttgttttatttctgttgagttttgagttctttatgcatgcttgatacaagtcatttggcagatatatgatttgcagaaattttttcccagtccaatttatcatcttttttttttttttacttttctgagtcattcttatggtgtcatgtcgaagaactctttgacccaagatcatgaagtttttttaaataagtttgtctgaaagtgtaaggctaactctatgaggatgagttcatttaggtgatttctctgactatatatttgatagacacaactaaatgaaaagtagcaccttttaatattgtcaggttaatgtattctggtttgtgtctttggttttgaacatgtttaaaccattaaaaacacattttaaataggctagtcaattttcttcttgcagaagagactggaaattaatttattcacttttgtgtaggcattattttatacatactatagagttgcacccatgcatttaataaaatgtgaatctcaactatgtgacaggcattgttctagctactagaggacatcagtgattaaaagcacaacaaaatccttcccttccaccaatgtatatttcagttaaatatgtatatcaggttgagcatctttaattcaagaatttgaaacctggtaagcttcaaaatttgaaacattttgagccctaccatcatgtcataagtgaaaaattccacaaataagtacttaacacaacttttactcatgcacaaaattattaaaaatatagtttaaagttacatccaggttatatgtgtaaggtatatatgaaatacaaataaattttgcatttagacttggatcctatccccaatatatcttattatgtatatacaaatattcctaaatctgaaaaaaaatccaacctccaaaatactctggttccaagtattttggataagagatactcaacgtgtgtgtgtgtgtgtgtgtgtgtgtgtgtgtgtgtgtgtgtaatttacactgattcaaagagagagaggaaattaaaatttaattctatctgctattggactcaatgaacctatgtccacaaatcctcttcagatgggatcagtgagtcagatatttctcccataagtctcagtttccatacaaatttgctgaaggaagcaattttcttaggtaacatgagcccaagatttaaaactatatttctcatggaatacggttttctaatggtaaacaaaggctttctttgttggacaacattttcatgaattctcgatgacaaattatgattatatgcaactctgtaaatactaatttagaactatatacaataaaatataactattttaataataataaaaatacacattactaaaatatgctatttattgactattttaatataaataccactttattggtattaatattatcaaagtaattaaagatgtccatcttcatttcagaaaaatggctgtggctgtttatcatgcttattacagaatagaatacaaactagaatgcattcaagttagagggggcaagatggctgactagatgcagccaggaaatgccgctcacacagacagagaccaaaatactaagaaaaccaacacactttgagcatatctttgcagatgaaacaccaagagtctatagagaagtgacatagacatgaaggctgaagagagagaaaggtgggagccctgtgagtggtactcaaatgctagggatagtttccagtcctgaacagctcctgggtaacgggtgagggaagggacagagggacaacccgctcttgctgcagacctctggggtcctagctacagaggatcccatatctcccatgaacatttgaactggcaggagaatccacctggaaagtaggcagagacagggcttcagctgatgtggagcccagggacttttgtgtgcagggcatctgcagcagagcatggccataggtgcccatccccaagggttccccatctccctttaagtagctctagcctcagctgaccaatggtccaggacaaactggggccagcttcctcactagactggggcacctatgttctgcaggtacttctgtccttcagcccctcccacaaccccagcctggccaccctgcaggaacatgtacaccgcacagtctggacactttgctccacctaagtaccttcctagcatgctgggagcacttcagatcctccagcacagatggagcccaatcccaaagatccagcagtaaaagccacaggctggtcccaatgccctagggctatgttctgcaaattgagagtgccaagccaagctctgcggccaacacttcagaaagggagggtgcctctactttcagaacactgagaggggtgagatgcatgggtttgtgggttggcatgcaagcagtgtgtagcttcctccacaatgctggtctatgaagggtgtggcctatctccctgccatggcctctgcctgagggagtcccatagcccagaacagctaacaaagcaaacatgggaataatgccattgattagagggggctccttcaaggccaggagtggaccttgtgcaagggtcatctctctccccaccaccacagagcatgactgcaaacatgaggaaatatgaaagagccatgtggctgattaagagcctatctgccagccattacttttaggtgccacccactggatcacagcccaaacaacactatcaaaaatattcttccagtatacaaccctgtgaaaccaatggcaagaatccagacaccaattaacagcctgttcagaaacttgaccctttgaaagcactcaaaatgaagtcaattgactatactcaacttacattacaataaaaggaacaccaaccctcttagatgaaaaagaatcagcataagaactctggcaattaaaaacaccagtctccccttacatccaaatgagcccactggctccccagcaatgattcttaagcagactaaaatgactaagtgacagacatagaattcagaatctggatggaaaggaagctcatcaagattcaagagaaagttgaagtccaatcaaagaaatccaagtaatccagtaaaaggattcaagatctgaaaaatgaaatagccattttaagaaagaactaaactgatcttctgaaactgaaacatttacaagaacatcataataccaccagaagtattaacagcagaataaactaagctgaagacagaatctcagagcttgataaccagttctacaaatcaactgaaaagtaaagaaaaaagaatgcgggaaaatcctgctacatactatacaagatgtttgtctccaagccacatggttattgattcaccaaggtcaatgtgaaagaaaaaatcttaaaggcagttagcaagaaggctcaggtcacatacaaagggaaccccatctggctggcagcggacctttcaaaagaaactttaaaagccggaagagattgggaacctattttcaatatccttaaagaaaagacattcaaaccaaaaatttcatatcctgcaaaactaagcatcatatgcaatggagaaattaaacccttttttgacaatcatacactaagggaatctgttacaactaaaactagccttacaagggagtgctaaacatggaaatgaaataatgacacctgcttccacaaaaactaaagcacagtgcacagacagtataaagcaactacacaatcaagtctacaaaataaccagctaacaacatgatgacaggatccaaatctcacgtattaatagtaactttgaatgtaaatggtctaaataccccacttaaaagacatagagtagcaagctggaataaaaacactgtccaactgtctgctgccttcaagagacccatctcacatttaatgacacccacaggtcaaaagaaaagaaatggagaaagatctagcatgcaaacagaaaacaaaaaatgagtatgagtcattattcttacagtagacaaaaggaacttcaaatcaacagtaaagaagaaggacaaagagaggcatgacacaatgataagggaaaaattcaatgaaaagattaaatatcaaaatatatatacacctgatatggtttggttttgtgtccctacccaaatcttacctgaaattgtaatcccataatccccacatgtcatgggaggaacctggcagagatcattgaatcatggagcagtttcccccttgctgatctcatgatagcgagtgagctctcaagaggtctcatggttttataaggggtttccccctttgctcagcatgcattctctctcctgccactgtgtggagaggtgcctactcacatgattgtaagtttcctgagtcctccccatatatgcagaattatgagtcaactgaacctcttttctttataaattacccagcctctggtatttcttcatagcagcgagagaacagactaatacagtaaattcgtaccaggtgtggggtgctgttataaagatacccaaaaatgtggacgtgactttggaactgggtaacaggcagaggttggaatagtttggaagactcggaagaagacaggaaaatgtgggaatgttttgaacttcctagagacttggagggctccgaagacaggcagatgtcagaaagtttggaacttcctaaagacttgttgaattgctttgaccaaaatactgatagtgatatggaaaatcaagaccaggctgaagtggtctcagatggagatgacgaactttttgggaactggaataaaggtgacccttgctattctttagcaaagagattggcagcattctgcctctgccctagagatctgtggaactttgaacttcagagagagagagagtcagaaattaaaacttatgtttacaaggaaagcagagcgtaaaggtttggaaaatttgcaggctgaccatgtggtagaaaagaaaaaacaatttcctggggagaaattcaagccagttgcagaaatttgcataagtaatgaggacccaaatgttaatcaccaagacaatggggaaaatgtcttcagggcttgtcagagaccttcatggtagcccctcccatcacagacctggaggcctaggagggaaaaatgatttcaggggccaggtccagggaccctctgctatgtgcagcctgggacttggtgtcctgtgtcccagccactccagctgtggctaaaaggggtgaaggtacagctcaggccattgcttcagaaggtgcaagcctcaagtcttggtagctcccatgtggtgttgggcctgtgggtgcaaagaaggcaagaattgaggcttgggagcttctacctagatttcagaggatatatggaaatgtctggatttccaggcagaagacttctgtagtggggagaaccctcatggagaacctctactagggtattatggaggggaaatgtgaggctggagccaccacagagtccccactgtggcactgcctagtggagctgtgagaagagggccaccatcttccagagcctagaatggtagatctaccaacagcttgcactgtccatctggaaaagctgcagttactcaacaccaacctgtgagagcagccacagggactgtatactgcaaagccacagggacagagctgtccaagaccatgggggccataccttgcatcactgtgccctggatgtgagacatggggtcaaagattatttgggagctttactttctgctgaatttcagactttcatggggcctatagtccctttgttttggccaaattcttccttttgcaaaagggcaatttacccaatgccagtacccccactgtatcttggaagtaactaacttgtttttgattttacagactgataggcgaaagggacttgcatcatcttagattagactttggacttggacttttgagttaatgctggaattagttaagattttgggggactgctgggaaggcatgattgattttggaatgtaggaaggacatgagaatatttaggggccagaggcagaatgatagggtttcgatctgtgtccctacccaaatctcatgttgaactgtaatccccagtgttgggggagggccctaatgagaggtgactggatcaggggggtggatttccccattgctatcctcattatagtgagtgagttctcatgagatctctttgtttaaaagtgtgtagcactttccccttcactctctcttttgcctttcatgtgacgaccatgcctccttctttccccttttccttctaccattattataagtttcctgaggcctccccagccatgcctcctgtatagcctgcagaactttgagtcaattaaaccttttttataataaattacccagtttcaggtatttctttatagcagtatgagaatggacaaatattaagttggtgcaaaagtagttaaaagtaatggcaaaaaccacaattacttttgcaccaacaaaatacaatgatcaagttgagagtcaaataaagaacacaatctcatttacaatagccacaaaaaaaaaaaaaacccaggaacctaggaacacagctaaacaaggaggttaaagatctctacaaggagaactacaaaactctgctgaattaaatcagagacaacacacataaatgagaaaacattccatgctcatgaatttgaagaatcagtgtcattaaaatggccatatttcttaagtaatgtacagattcaacactatgcctatcaaactaacaacatcatatttcacagaattagaaaaaaactattttaaaattcatgtggaacccaaaaagatcctgaacaactaaagcaaccctaagcaaaaagaacaaagctggaggcatcacactacccaacttcaaactctgttataatgctacagtaaccaaaacagcatggaactagtacaaaaacagatctatacaccagggtaagagagcagagaacccaggaataaagtcacacacctacaatcgtctgatctttgacaaaacagacagaaacaagtaatggggaaaggactccctattcaataaatgctgctgaaataactagctagccatatgcaaaataaaactggactcctaccttttaccatataaaaaacttaaatggattaaagatttaaatataatactttaagctatagatataagaagatctaggacacaccatagtgtacatagtctttgtgaggtaatttatgactaagtacccaaaagcaattgcaactaaaatgaaaattgacaagtgggacctaattaaactaaagagtttctgcacagcaaaagaaactattaacaaattaaatagaaaacctactgaataggagaaaatattcacaaactatgcatccaataaaggtctaatatattaaatatttaagaaacttaaagaattcaacaagcaaaaatgaataacctcattaaaatgtgggcaaaaaagaagacatacaagcaaccaacaaaaatatgaaaaaatgctcaacatcactaattatcagagaaatgcaaatcaaatccgcaatgagataacatttcacagcagtcagaatggtgattattaaaaattcaagaagccatagaaagtgttgaggctgtggaggagggggaacaattatatactgttgatgggaatgcaaactggttcagccacattggaaatatatttggagatttcttaaataacttaaaacagagctaccagcagtcccattattggctttacatccaaaggaaaataaatcattttatcaaaaatacgcatgcactcatatgttcattttagcagtattcccaatagcaaagacattaaatcaacctaggtgctcatcactggtagactgagtaaaaaaaatatgcactagggaatactatgcagtcataataaaagaatgaaatcatgtcctctgcaggaaatgggtgcaactggaggccattatcttaagcaaatttatgcaagaactgaaatccaaacaccacatgttctcacttaaaagcgggagctcaaccttgagtacacatggacatagagatgaaaacaatagacactgtggattactagaggggagagggaggggccatgggttgacaaactaccttttgaatactatgcttactacctgggtgacagaatccatatcccaaatctcagcattgatcaatacacccatgtaccaaatctacacatgtactcccatgcctaaaataaaagctgaaattataagaaaaaaatacaacttaaaacagaaggaacaaaatccaaattgtaaaaagaaaacattcaaggcagaaattaaaaaataactgtgagaaaaatcagaaaatatttatgtaacagaatatattttacaattgtgaaatactcttaaaatcaatttgtgcttcctagttcttcaatcaaataggaaacctattagttaaaagatacaatgcctaagatcagtgtaatattttggagtggagtgcaagcaaatctaggacacatttatcccagctgtttgcataaagaagttctaagagcaatggcagaaaatatgcaattatgttaattcaagattctagctattaggaagatgtaacactccagactatggtaacaaagagttttgccctgtggaaaccttaggctgcttattttttgtaattggagtagagcattgacatctaagttttagttcattagaaatatttctgctagtacataagtttcaaagtgctagaaacatgatttttccttaatttgttaactagtgctgtgacaaaaaatatatagattgttttacaattgtcttctactgtgcagatgtaaacttgagcttagtacatttctgaattagcctacaatccaaattaattatctgtatctactgagatgtttctgggtaagtacagaaagacatagctctgtggagagagaagtaatagtgtttccagtgataacttatgttaaagaagaccaagcttgggatgccatgccttaagaatagactctcaatatatttttccagcttccattgttgctgccccaccaacaatttagtccttcttaatactatatagctattaagtcaattttatgcatgataaatctattatcttagaagagagaacagtgctgatggataaatgtgcactattgtttttattacaaggatgtagtcaatcgtcgtcattcccagattgtctatttgtgaattggcttacttgctaaaatttatttgtatccccaaatcaatacttgcagtactttttcagccatttgctgacataagcaaagtgtcaaaaaattttagtggctgtgcacattctcagcataggttgaagaaaatacttgatcttgtttcagctttcatattattaaaaaaaagaactaccattctacccagcaatccactactgggtatatacccaaaggaatagaaatcattccaccataaagagacatgcacacatatgattactgcagaactattcacaatagcaaagacatgaaaccaacctaactgccaatggtagattggataaaaaaaaaaaagtgtggtatgtatgcaccatggaatactatgcagccataaaagagctagatcatgttttttacaggaatatatatggaactggaggtcattatccttaacaaactaacactggaacagaaaaccaaatgcttcctgttctcacttgtaagtggaagctaaataatgagcacacattgaaagaaagtgcaggagaaacagacacaacagacccttgggcctacttgagggcggagggtgggaggagggagaggatcagaataacaacaacagcaataacaaaaaaacctatcaagtcccatgcttagtacatggcggatgaaataatccgtacaccaaacccccgagtcatgagtttacctgtataagaaacctgcacatgtaaccccgaacctcaaaaaaaaggtaaaaatttttttaaagaatgaataaggtctagcacttgatagcacaacagagtgacaatagcaaataattaattatatattttcaaatacctgagtataactggattgttcttaacacaaaggttaaaatgtttacgtgacagataccccttttacccccatgtgattattatacgttgtgtgcctgtatcaaaatataccccatcaatatatacacctactatgtaaccaaaaaaattaaaaaataaaaatgaaggctgggcacagtggctcacacctgtaatcccagcactttgggaggccaaggcaggtggatcacgaggtcaggagttcgagaccagcctgatcaacatagtgaaaccccgtctttactaaaaatacaaaaattagtcaggggtggtggtgtgcgcctataatcctagttacttgggaggctgaggcaggagaatcacttaaatgcgggtggcggaggttgtggtgagccaagattgtgccactgcactccagcctgggcaacagagtgagactctgtctcaaaaaagaagtaaataaataaaaaaaaaaatgaagaaaatataaaattaaataaagaggtattttttttgcagcctatttactgccacattttttttagtacttttgtgcaatttgttagtgactttgttgtttaaaatggcctccaagcatagtgtggcagtgctgtttagtgtatgcttcaacatgattctataataatctactgataactgcttagcaaatgacattaatattataatttaaatttatttgtagaaacaccttaaatgatcatttaaactcaggagaaaagaagagggtccttggtttttgtgtagaacttggagtaaatactatagtttcagtaatgatcacaccatcaagctgttaacaaccaggtgacagagaaaaagtttaagggctattaaagagaattaaagctggctaagataacatgggacataatgtcccatgccagacattaacaaattataataaaataatagaagaaagaaattgaacttgtaattaagcatctatttttgcctccaggtttgtgttgtgtttttatttatctcatttaatactcaactctgaagtatcgtcattgtttaacaaaagaaagaattgagggtcagagagttacatgttctgctccaggccacacacctacataatttgattattggcatcaaaattcaaatctttgggttttgagtactgataatgtctagaattactctcctctcttacctgtaagcctcttcctcaatactgattgtgcttaggttgttctctaaattttgaatcctttgaatttccacagtccttccttcaacacaaagaataatatccagggctactctttcttattatagtaacttaccctgaagactcggacccaatgttcttcctctttgaaacatattctaaagacatagatttgaattttaaccctggcatcagaaaacaacccttcagcatatatgggtatatgtatgtttatgtatatgtgcaaattttttatatgttcctgaataacacatcttgtaccaaatgtgatttaaaattgttaatagagataacatacaataaaacaacttactgagttgtttactatgtgaagactacctctcattcaagagggaggattgagcacacatgtttacatgctgcttctgtgtgactcaaattaaataacagtaatgggctaaaaatgcataaattcataatgatgaatagaatgagaacaggaacaacattagatgatgaattttaacatttatgatgacaaaaatagatcaatgagatgtgactaaagagaaaaagccatgaagacaaagcctagaatatatgaagaagtaattacaagaaaggaggcagaggatagaatttctcaatacatttctcaactcagaaacttcaagaacattagagagtgaaatgtagaggatgggataaacagacatttagtaatctctatgtcaatattctctatttcttaaggcaaacatcccacaaccaagtactcatgtcctgacagaataaacagcatgagattcttctgtaaaaataagtttgaggaaaactagcacaaatattctggggtattgacacctccgagtaatgacttctgcattttatcatttgggagtctgacagttctgtgtcagtttcttcttgactccttccaaagtaagtttggttaagttaacagctctgcccttacacttttaatttgcactatcctattgttcactaaacagaaaaaggcaaacaaggatcatcaggcttctgcattataaagataaagtccaagaaaaacaaactgcaaactagacttctcgtctcagttgaaaagagaaattttaaggaagataactgaacaaaaacctatgtaatattgacagacacatatttacatatccataaaataggaaagtaatacaataaaatgggtatggagagaatataaagtgctattatgaaaaaaagatggtttctgaaatatatatattatataagtacatagaaggtaagtatttggttgtgggatgttttgccataagaaatagagaatattgatgtagagattacaaaaaatatagatgatagataatcaacttgtagaattaacttagagacagaatgcagattatatatatattatatataatcatatatatattatatatgaaggaggtggaggagatgagaaaggaagatagaaaagaggagagagaatattatgttaggacagatactttatatgataaaagaatcagatcaacaccatatatcttactaacatattgatgctagaaagcattagatcaatgcctttaaagctctgaggaaaattattttcaacttaaaattctaaacctactgatattatcgatatagtggaagtgtcaaagaaagttattgtgagacatatttgaactaaaaagtttccctgagaatgtattctagcaaaatacgtgcagaaaccaaggaagattgaacatgggagccagtgatccaggaaaagaaaaattaagtgaagttttaatttaatacctacaatgtagcaaaaataacaattagtaaatgttggaaatagaacagataattcagagaatagggtatctgaagagacagaaagagaaagagaaagagaacatatcacatggtttagaaaatgttaccaaggcattaaaataacgaaataatttgataaaggcagacagtgctagatttaaaacaatggttagaaacttctacataaaaattaaatgctatataaaaaagaaaatttcattacaagatactctttaactctgtagcaaaatataattggaaagtcataataaaataaaatcttttaattgatattcaacttgtagaattaacttagaaacaaaatgcagacaatgtatgtcacattctgttttgtattgctatagcagagagagttacctgagagtgggtaatttataaagaacagagatttagtttttacagctctggaggatgggaagtctaagatcaaggggccacatctggaagaccttcttgctgcatcatcccatggtggaaagcagaaggaccagatggcacacttgagagggagcagaagatgaggctaaattctcttttataaggaactcattctcatgatagctaacccactcccaagataatgatattaatctattcatgaggcagagccctcatgacctgatcccctcttattaggccccaccttttaataccattgcattgggagttgtttccatgacatgaactttgggggacacattcaaaccacagcaatataatttcagaaaaaatacaaaagtgcagatgataaagattgggagaatagataagaaatacaatccaggggcatttagacatgctactgtgcttgtcttgtacaatgcagaagcatgaaacacaaactgcagttaatgaaaacataatgttaccaagaaaatgaatgcagagactctgccttaagcaaacactccttttgttcctgctctggaattctggaacatctgtcatccttaaacactttataggcattaagatgaggcagggttgtttttcctctagttataattaggtcagtctttagaatttccaggagatttaatagactgtatattatcaggtaattccttattgtctcttttaatagtaatttcacaaggtattataaatcaatgaacacaagactgcaacatttttttcagaaataattattttgttaacacatcctttaataatcagcttatcttgggtcggaattagcacagtcttataagaaattgaagaaataaagacacctaagtagtctaaatataaggttagtcaacttccacttggaggtgtgattagcttcatggggatgaacatccaggcagaatttcagatgctgagatagatattaacaagatgttattcactcatttgaacattgtggttagtgtcccaatatatattctatcccctccttgttaaggctggttgtaaacagcaatgtggtcctaagacttaaccctatgcccaggaaagggcattgattagtctaatccaattaatttaattcctttaattctcttccccttgacactgtttgtcttaaaaaaatccaggtttaagtcaattagcacaaaaccatctcttggtgaaagttattggagcagggataaatatatcatataatttggtccaatcaaatggaaagataagcactttatcacaagctttatgaaacataataaggaaggcattactaagttgctgttggcattaattttgtgaccatgaaagaagtgaagggcagaacaataagaatttgagagaaatgtagtcttggtcaaaacatgcctgacattcgctcatctctgcacttgcagataagtgagataatcctgtatctttaagcagagttggcttagatttcaattatgtcgatattaaagtatcctaatagagataccctctagctgtaagccaatcctggcagcataagggaagtgacctgaggagtccatgttctctttttttagttccattccttagacacaagaatgttatgcaaggggcaatcacagatccttttctccctggttcttcttgcaggcacaatgatgggagtagtgaggattatactttaaagagtcaatcaagactaacatgtaccatgtaaaacatgaccttgtgctacataattctaaactgatgatacattaaatcttaccaactccataaacatatactggaataattacaggtattgtattggtgtagtatttaggaaataaataaaaccataatggagaaaccatacaggttactgtaacaaaattaaggggaggggttcttcacctgtcaccttaagcaattacaaaatgttgagctatttgaaggtggtgataatggatgccagcaaatcattcagcttttcctcagtgcataacttacataattatttattgaaatagtgataaatgagtctgaaatattgatattctgcaataaatggtcacttttaattatgttcaaatggatgctttgcctgatagaattctgtcatattaataaatgttgcagagaaaacacattccttatactaacgaagggacaacattctataatttaatcaaccaatttctagatgacgacgtggggaaggggaaagcagtaatcaccagtaaccagtaaatagtttagtggtgtgccttaacatgaaggaacacaaacagttatttagttcccctttcttttgtaagtgtagatctactctgtgccaagtcaacagagtaaataattgtggaccagaggaggtcaatgagaaggggttggtccaattttatgaggattccagggagagaagatgttaatactaccaacctgttctccctgatatttggaatttatggggaactactagacagaaggttactaaccaagacctggcagcagtgagaggcagcaagtatattatcctagagggtaggtagatgttattatggagggtagagagttctcaaaatactaatgagctacaacatcaaatcagaaagagagacagagaagtaagttagtgcttttagttacaagctttgttaggtcttgacacaatgtacactaggaacttttaattcaatatctagacaaatgccaactgaaattattgtttgataggaactatctacttccaacttataatttcaaaccaactacatggatttagggaaaagttttttttttgaaaaggtttttcacaggacaaaatgctaggcaggccacccccaaatatatgtaatactaccacgttttgtgcatttataagttgaatatggtacaacatgtctagatgaatattcaccctgtatgtgtatgtgggtcaagggagcacggcatagacatatagatgtgtctctcagattcctctttaaggaagaatttgttgcccactcatggagagtacagtcagcagataacctccaggggtcagccacttcagggtctacctcaactgcagacctccataccacccaaggttatgatcttcccaaagcagctcagatccaaggactgaatgaaatgtggatataaaattctagtcattttggccagatgcaagacattatcatgtcccattgctctttgccaaactggatgaggatttcttgggcctgagtcacaattttcctttgctcaatcctgctacacattctttcccttcacagatattgattcttaacaaacacagagaatcccaagacaccaaacttcatcattatttgcttctggagaacttaatctgtgtgtgtgtgtgtgtgtgtgtgtgtgtgtgtgtgtgtgtgattgactctgtatctgtaagtctgtgtatattctagagcaagcctatctggataaaactcttggttctactatttactagatgaagataataatttatcccaatctcagattgaaatgacttaatccatgaaaactctgaacagcagctggtacatagtatccaacaaatgtcagcgattagcatacatagccatatatatgtatgcatatctgttgaacatttcaggaatatatacttgttcatttatgcaaaccaattctagaatatagtaattatggcgaaaactgcctgttttccatgcttagaacaaattgctgacaaaactgcttcattgtcatatacgatagactcgctataattatttttcactaatataaccataacaactccaaacaagtatttaaatttaacaagctactctttattgattcagtctttgctgaagatgatttctacaaaagctcatagaaagctatgtttacaaagaatttttcacctgttcacaccagctttacctgcaacctgcaagcagttactttccattaggatgttgaaatctttaaacctgggttcattgtaggagatgggtactgatggggagtttactttgctttctttttggctatattctctgctctggagggtttcatattctctgtgaaacaccacaaaaatgaaagtctagcaaaatgagagtctgactttcaatacttttttctattttatcatgttcttttttagccaatgtcaagaggagggggcattttcctggaattttcaacgacctatgtgctgtgagccagtttgcaccattcaaatgattctcattcacagtggccaatccctgattcctatggctcttagggagggagcagggtatcttttgtctcccttatgtgggtgatcccagagatacatttgttaggtcgtgtaagtattaaatgaaataaacttgaggaagggaacaaaaagagataattagatgtcttgcaatatgtttttctgtacttgactttcattgaccaaaggggcttctgtaaggcatatgggtatgagtaccaagaattttaagagctttcagaagggaaggagcacagattgggaaaggtttgaaagtcattttcaatgtttttatcctttttgttaaatagtcaacatttgtgcttgaagcctattaccagtacaagctgggcaagataactgtaactattcacagcagacaaaacagaaaactagattctccattttcctcaaacagtatatactcatgaaagagcaaacttcaaattccccatcttttcccctctactaacatagatgcttgaaaaattattttgattttatcaaagtgcacctttgtaaaggaaaaattacccttttcagaagtgttatgatttgaacaacatattgttctaaatcatactacaattcttcattagtttcattcatttctataaaattaatagtcaagtgtgctggctgtaatgtgtattctatatattaccagttttgtgagatgcttgagagcagagtttatatcttatttcatgttctcggcatttagcatagaattcaaaatttgcctctgcatttttgtatccttgaatacaatagcagtaaaataccagaattgccttgttggggttatattatcaaatgcatatacatgaatgttggcctttctgataagctaattaaacagcaactttcaaggattaatttgaattcagagacacccttattatccacagtgtatgtttcacaagtagaaaaaaaatggaatcatctccaaaaggatatggattctcattttttcttcatggttatttgtagtagaaataatagtattagcatgcaacaatcttttccatatatacagaaacatgaaggacacatttacgttttaatagtttagattttaggagatatcttatggtaataaaactgttaatatcttcaattcatttaaaatgtttacaaggaaatgttaaaatatgcatataacctctattgaataattcatactcatagtaagacttcggataatgtaacatttgaattgtatatactgcaagttgacttgaatgattgttttacctatataattcaccagcatcccctgtgtatatagagattgtatttccagaaactatgatgctctgagctgtttaggtgtatagcttgcgccaattatgttattcatatattaaattcattttgatgtgagatagattattataatttgttcagagagttttggaaaaaacgtgccatcactttttgctgcttttttcttttcattaaactaatggcaataaatcactacaaaatacgcaggaaaactagggggaaatttttaattgtttaatagagttatgcactaagttctctgacatttgtaactattgctttcatgtaaagtgtttacatgaagtaaaattttcaaatttcatgaactctaagctgaactttcaaccccagagaattctgaagataatactgcccttaacttgctctttaacctttttttttggattttcgaaagtcgtctgttcatttattttcaatctataaatattgttgggtaccagacacttccaaatcacaagagtgggtattaacaatagctatcacgatgaattatatacaggtattttcttacaggggacaaaggtgagagaaaggggacaaatatttataaatactaattgcaaaccaggcagacgtattgtgttttcacatatatactcatttgatttgcacaacactatgatgaggtatcatattttaaaaatttgataaatgagtgaactgaattattaacttatacaagtttgcacattttgtaggcatggaaccaggagctaactcctaaaagcctcccttattttgtcttctctactatactctgttgcctgtggctaagtagaagagatgaagtatatacaaagtatacaaaatagaaaatgttaactgccagaagaggagtgctgataaagtagtatgagagttttacagttttatacttcacaccgcaatatttgaagcccaggaaaagaacgtgacttatagtttagaatttagtatttcttttagtccctcatgtctcaaacctaaggtgagttccttggaatggtgtgctgtttgagtttaaagcattagaaatcagcagatgattatggtgtaatgtttgagattgcacagacatcagaatatgggaacaattctttattcttttaaaaaatattcacttttaaaaattagtattccacttcctttcctttgaataggtcttctaaaagtcatttccaaagcattacagcccatgaagtatttacagtggctaccctccttctcacaggatgatggcaaccgtaattacaattgcaggtcacaacctttcaaatatccctatggctttaggggttataaaaccataaagaagctccacatttccatttttatcattcaatccaatctttttactgtggaagtctccaagagagctttaggtaatcaacctttttcctcactgtcactcagcaattggactttcataagaatttgaagacagaaattatatccacagctctaagtgttctaaatatgtctctatttcttaccttctactttttctctaaacacagaacttttattcactgaatatttactacaaagcctactctaggtcaggcttaggcaatatgtgagaactggacatcgcagtgccaagagctcctaagtgatggataaaggaggaaaagagagggaggatatgactcgggtccccagctcaattgcagggaccatagcaggtctttgtgaagaaaagacaaatgttcactgtatctgaggagaacagacatttatctcacgctcagttaggaccatagtaacacagtgtcatttcagtcacaaaatgctctgcagctttggaagcccctggagagactatatcccatgtgatgggtgatctatgagaacggtattatcagtggtttaaataaatgtcaagtgaatatggtagagaaataatagaaacctgatgggaaagtagccacaacaagcaaattcatattgttcaagcatgttagtgactgtcccatgagacttctcggagatatttgatagagaatttggcagggatttatagttctgtgtggtcaggaagaatatagaatcaatgctaatatgaatgtatttgcatattaaagaagatataagccaaagatggatcccaaagatgatttttatacagtgttcaggtgtaggatgtatacatttgcacataaatcttgtatagtttgtaaactgcatgagaggagggaccttgtattagattctaattttctggcacccaataggcacttcttgtttgctaagcctggtggttatatatcctaatattggaggaattctcagtcacatattacaggtaaaggtatagtaatgataataactacaacttcgtgaacgcagactatgtgccaggtattgttttgggtttttacaaatgtcaactaattcattcctcataaccaccctgggaaggagatattttgattttgaatcttattcttgacacttatttgatggggactttggtaaagttgcttacattttctttacttcagcatcagcagatactaaaaagaaatacaggggataatacaggcatcttggatgattgtgataagtaaacaataagtatttggtgcccttcacatagtggctgccaataacaatgttcatttcagtccttcctttagttctcttgtgttaccttggcctttttctacaagtagtgtttacttagaattggcctgtattgttcacatttgctttttaaaaacatttttatttacttattataacaaaagagtttttcagtttctggttagaatgagtctgcatcactcttgttccggattgctttacctgcagattcctcatttcctgtctctacacagcccagtatgttggagacatcaaaggccgctgaggagagtcatccatcatcttgacaccttttatgagtttactgctcctgatggtgattataggaaaggctgcttcaaagtgataactgccagaggtacttgacgttcatagtattgaataacagaaactaagtccaagtttgggacaacagaaaaaataaataaaaattgaaggacaaaatgaagaggtagtaaaatgcaaaggcaactctaaaaagctggttctgattgagaagtattgattttaggtggaaatgaaccaatagaatctattccaaaggtaagttctcatagattgtgccacttccacaatgccaatttagtcacatgacaataagcccttgagcttattgtcttgatattttgtctatatgacatcaagcacctagggtctggctagtttcaaatacaggctgccatcacaaatgaaatcaatgcctatttaaaggagtcttggtattgctaaagaaaacatagtgttcccattggtctccattatcatgttaggggtgctttgtgctattaacaaatgtgtagtgaaaatgaccaattagattcaataataataactaacattaactaagcacttaggatatactactatatcatatgctaggcatcttaactacattttcttacataatcagtattgtagtcagcactactgggggtattaatcaacaataccatgtttcgctgtccatgttcagaattaattgagatacagcacacaagactagggcaaatggaaaacaaaatattgtttttatcactgataaagcttattgtataatgcagctttcgatttgtagccagaaggtatagttaatgtgttgcttcaatgaaaacagactcatcactgtttactggtttactgtttactgtttagtggtcaccggttgaactggacaatatgagggctctcccaaaagtggcaatgttttctccattatgtttacaacatagcagaatgtgtgcctcctggagacaaggtgactctaaagagagaagaaaggactgagctgggcaagcttatttccttctccaaatttgctaatcagattagactctcctctgtgagaaagaatcagtgaggaggcagagagtagctggaaatgtttctccaatatttccctctcttgaaagtgaaggtcttatttccttccccaaaagaaatatgagaagtgaggaacagaaaccccactcccaacaggacccataatattacacaattaataactgaaaaaacaagtttaagttgttaataacttattagtttcaaaaaactagtaagtgacataaattggctcctagaaagtctttaacctccaaagatttagctgtgactaactatatgtaataattatttagtagcataatctatagaacacagagaaactttcagtttatataatatataacatacaaataatatttggaagatcagcattagtgccattatgcaatcaatagtaaattctacaaataaaaggaataaacgtactcaaagttttattttttatttcattttattttttctccaaacacaatgagttattcaggcagaccatgtggggaatggttttccaaacagagagaaaacacctgataagtcacagaaacaccagtatcatgctattgaaatggctatgttgtccgggatataaacccggggttcatcatctcatgcaaggaaaatttaggacacaggcacacacgaggagtttaggagcagaggtttaataggcagaagagaaagagaaacagatttttctatagaggatggggtctctgagaggaaaagacccgctggaggcgaaagtactggattttatagtctagtttggggaggtggtgtctggatgtacatggggctcacagattggttcaatcaggtaagacatttacatagggcaggggaaaagctagtcactccaccctaatctcatgcaaatgagttttccaactgatcggtgccatcttatctgctcctcacaatacacgtggctggcagagaagggaagatggagccgccatcttgaacatgtctagttcttagttcctgctggcattcacccctgcaagctcccagcttgcttgtctatgtctgcagcttgactttacaggctactgcttgttagaaaatgatttggggctgcttttcattaaagagaaaagccttactgaggacccccatatccttactatctgcctaaacgatttcttcttaactcctacatccttatgttctagggattgcaaatactttcatgagaatggggacaagagatgcttgcacatgagattatggcagaaactcatgactggaaaaggatgaactatccaacatgtcctaagaattttggaatttctcctgaagttctcaggagttcctcaaaatttgaagacaactgtaatattgcaaggtttacagcttaggagttgcattgtgacagaactgtggaggaagcttcaaagtagagtgtgactagcgataaggagactattctggcagttgttaaaatggtccaatcaaaggaaaataatgaggtcttatttcagggcagtagttatatgaaggaatgaatagatgcataggctccataaaaagtatatttaattagttaaataagcaattcaattttgggattcagcagaagaggaagggtatctgtccccactgagatgatgatggtgactactcattgcaaaggggaaaacaggcagtttgggatggaggatggtgatgtgttctatatgatcatactgagtttcacagaccaatgagttctccaactggagatgttcaattgacagcagattcttgaattcagaagaggacactgggcttgagtagtacaactgtgagtcattggattaaagaggtagaagttgtatgggtagctgggatctatcagaacaaatacacaaaattaagagagaaaatgatcaaacaacagcattccagaaactaacatgtaagagctgggagaataaagataagtttatgattgaggggttaggcacagtaggtacagtttaaggagggcctcagtgtcatcatggaatgaagaaaagaaattaaaagaaaaactgaaagctttacagtggatcattaaatacttccatttaataatgacagtacaagtgactgctatgtgtttatttacttacagcccaacacatcctaagcaatcagaagcacaatatgtgtttctagaatgagtggctaagacattcagattataaaacataaaaaagattaaatatgggccattttagtcatagaaacaataaggtaaaatctgtatctttaggcaatactttgataacatgatgaagaaaatttgaaataaacaataaagtaattgtaaaagcagttaggtcactgagaactaaagtttagcctagtaatgaaaagctggcttaggcgggggataggaaaatcaaagttttaagaccaagtgtgacactgaaatactaattaggacatgcttataggcaaagttttacagtgtatatgtgtaaacggagacctgagagcacttacatgaaaataaaactttttcgtttccaaagatgtcttcaatttcaagaaagttcagaagcagtaaatcatttgatgaaacaatctgagcaaatactcctaatcagatgttacaggttaaaactttgcaaacagatatcagaggagggaaaaaagaaacatgtaaaaatgagtcagatggcattgagtgtctttctttatagagataaagctccccagcatccttgagggagagaataagagctttgtaaagatgcatctgctttaagcaatgttcagaaaaattgacgtgaaagaatggagtgcaaacacaagaagaaagaaaagagagaaagagagagggagggagagagagagagaaaggagaaagggagggagggagggaaaaagagagaaaagaaaagaagaaaagaaacattatgagcttagaattttgtgaggaatttttacagtgaagtagtatttgatccacaattacaaattatccactgactagcttcagaagaagttctattttttccctttataatgaggatcaataaaaatatattactcaagtgttcaacttctgtattcagccactatgtacaaaaatgaataaaaatgtaatacatcataaagatacatttatcttatataagtacaatgaaaattacaagttggaaaatgagctgtgtagaatttatattcagcaattttgctgcattaacgaatcccagagcataggttcttaaaatgatagccatttatgtagcacgaggttctacatgttaacaatcaggcctgggcttgtttggtgtttcttttggtcaggctcagcttggctgatttggttgagcttgctcatacatctgttaccatttggtgaccgagatggttggtttatgatggcattacccagatagctaggatggctgatacctttttctgtagtctttcaacactttgtttgatgattgctgaattccaagatgagcaagagtagaaactgcaaagcttttggacatccaggctttaagctgaaacaacagcacttttgctgcattctagtggtcaaaatatgtcacaaggtgagcttagatttcacagttagagtaattgatcccacatttttctgagagaaactgtaaaatgttgtgatggccaagtttgttcccaagaagagaatcaaatataagttggaagactgttatttcttagaattttaactactaagtgtaatacttcatagaatatttattttaaacagcaatgcctttacaaagcctatagactgaccattaaagatggaagctttaccacacgcgtttacctactccacttccttgttatgtaagtttatatattatcctcattctttaagttgtttaaaatagggttatttattatttgtaggaaaaaaatatcctaactaacacataggtacacgacttggtatttagtgaattgattaattcaaagctcaagttcaaatttttgttgatttctgactatgactcagtaattttgagataatggggataaaaacgatgagtagagccaaggagacaggaaaatctttccattcagcttacagaaagggaaatggggaaagacaattaaataaatgaagatggtattctctgcctgtatcaggcctcatcagtggagggccaaaatataaagaaataaaaggaaaaccttttagagaaaatgatgcctgagctgaccatcaccaaatgggaaggagttttctaggaagtcaataataaggaagtggggaagtatgaggtgagtgtcttagtctaaaggaaagcaaacataaaagtggaggtatataaacaggtttgttttattcagagaaccactagttgtccactccttatagctaacccaggaagtggacagtaaagtgggaagtgatatggcagagaacggccagtgttacatgtggtattggcatgcaattggaattgatgatgtataaatatcaagttccaagctgccacccaataatttcctacagtattgcttttcttttgcttttgattttcgacacaggcctcagctatcactctagatatttcgcttttcaattaataatcattctgggtgagaaatcagtcatttactagaaataagaatatcactatcaccatttcagatgtttccaatttattcttgttgatttaagatcttataccaattcaaatttatagcatgtgcatttgtatataacaatggggtttggttttaatcacagtatggggttatttcactattcatgaatatgtatgataggtcaaaaggaatggagtagcaagtattaattatatgattactaattgatttaacatggactcagagtacttaacagtctctgatttaatcagttttttctttatttctaattagttttctttttttatggatttaatttattattattattattatactttaagttttagggtacatgggcacaatgtacaggttagttacatatgtatacatgtgccatgctggtgtgctgcacccattaactcgtcatttagcattaggcatatctcctaatgctatccctcccaccttcccccaccccacaacagtccccagagtgtgacgtttcccttcctgtgtccatgtgttctcattgttcaattcccatctatgagtgagaacatgcggtgtttggttttttgttcttgcgatagtttactgagaatgatgatttccaatttcatccatgtccctacaaaggacatgaactcatcattttttgtggctgcatagtattccatggtgtatatgtgccacattttcttaatccagtctatcattgttggacatttgggttggttccaagtctttgctattgtgaatagtgccgcaataaacatacgtgtgcattgtgtctttatagcagcatgatttatagtcctttgggtatatacccagtaatgggattgctgggtcaaatggtatttctagttctagatccctgaggaatcgccacactgacttccacaatggttgaattagcttacagtcccaccaatagtgtaaaagtgttcctatttctccacatcctctccagcatctgttgtttcctgactttttgatgattgccattctaactggtgtgagatggtatctcattgtggttttgatttgcatttctctgatggccagtgatgatgagcattttttcatgtgtcttttggctgcataaatgtcttcttttgagaagtgtctgttcatatcctttgcccactttttgatggggttgtttgtttttttcttgtaaatttgtttgagttcattgtagattctggatattagccctttgtcagatgagtatgttgtgaaaattttctcccattttgtaggttgcctgttcactatgatggtagtttcttttgctgtgcagaagctctttagtttaattagatcccatttgtcaattttggcttttgttgccattgcttttggtgttttagaaattataacaaactgtctctcagaccacagtgcaatcaaactagaactcaggattaagaaactcactcaaaactgctcaacaacgcggaaactgaacaacctgctcctgattgactaccaggtacataacgaaatgaaggcagaaataaagatgttctttgaaaccaacgagaacaaagacacaagataccagaatctctgggacacattcaaagcagtgtgtagagggaaatttatagcactaaatgcccacaagagaaagcagaaaacatctaaaattgacaccgtaacagcacaattaaaagaactagaaaagcaagagcaaacacattcaaaagctagcagaaggcaagaaataactaaaatcagagcagaactgaaggaaatagagacacaaaaatcccttcaaaaaattagtgaatccaggagctggttttttgaaaggatcaacaaaattgatagaccgctagcaagactaataaagaaaaaaagagagaaaaatcaaatagacgcaataaaaaataataaagggcatatcaccaccgatcccacagaaatacaaactaccatcagagaatactacaaacacctctacgctaataaactagaaaatctagaagaaatggataaattcctcgacacatacactctcccaagactaaaccaggaagaagttaaatctctgaatagaccaataacaggatctgaaattgtggcaataatcaacagcttaccaaccaaaaagagtccaggaccagatggattcacagccgaattctaccagaggtacaaggaggaactggtaccattccttctgaaactattccaatcaatagaaaaagagggaatcctccctaactcattttatgaggccagcatcatcctgattccaaagcctggcagagacacaaccaaaaaagagaattttagaccaatatccttgatgaacattgatgcaaaaatcctcagtaaaatactggcaaaacgaatccagcagcacatcaaaaagcttatccaccatgatcaagtgggcttcatccctgggatgcaaggctggttcaatatacgcaaatcaataaatgtaatccagcatataaacagaaccaaagacaaaaaccacatgattatccccatagatgcagaaaaggcctttgacaaaattcaacaaccttcatgctaaaaactctcaataaattaggtattgatgggacgtatctcaaaataataagagctatctatgacaaacccacagccaatatcatactgaatgggcaaaaacaggaagcattccctttgaaaactggcacaagacagggatgccctctctcaccactcctattcaacatagtgttggaagttctggccagggcagttaggcaggagaaggaaataaagggtattcaattaggaaaagaggaagtcaaattgtccctgtttgcagacgacatgattgtatatctagaaaaccccattgtctcagcccaaaatctccttaagctgataagaaacttcagcaaagtctcaggatacaaaatcaatgtacaaaaatcacaagcattcttatacaccaataacagacagagagccaaatcatgagtgaattcccattcacaattgcttcaaagagaataaaatacctaggaatccaacttacaagggacgtgaaggacctcttcaaggagaactacaaaccactgctcaatgaaataaaagaggatacaaacaaatggaagaacattccatgctcatgggtaggaagaatcaatatcatgaaaatggccatactgcccaagggaatttatagattcaatgccatccccatcaagctcccaatgactttcttcacagaattggaaaaaactactttaaagttcatatggaaccaaaaaagagcccgcatcgccaagtcaatcctaagccaaaagaacaaagctggaggcatcacgctacctgacttcaaactatactacaaggctacagtaaccaaaacagcatggtactggtaccaaaacagagatatagatcaatggaacagaacagagccctcagaaataacgccgcatatctacaactatctgatctttgacaaacctgagaaaaacaagcaatggggaaaggattccctatttaataaatggtgctgggaaaactggctagccatatgtagaaagctgaaactggatcccttccttacaccttttacaaaaattaattcaagatggattaaagacttaaacgttagacctaaaaccataaaaaccctagaagaaaacctaggcattaccattcaggacataggcacaggcaaggacttcatgtctaattagttctctgatgaaccgacttcaatctatatattttgctttgattttccccaacttggtgtataagtacaactgctcttctctgaaagcaaatgttagtaatgatattataaaattattatgacctttcagtccattccctttaattaaaattttaagggctgggaaaactcaccagaatgtttcctctatattatatttattaataatttatatagttaaaatatgccttgttttttgtcagctacccttggacacaatttttctgaaattgtaaaataagtggaaatgtaaaggttatctttaccaagtgacaaaaaatgtattagatgtattactataagatatttgaaatgtagagctgtgttaatgatgtaacatcttatgttaaaaaaggagacatctaaggtataaccatatgtttaagttactcatgagattccttttaaggatgcataacccaagagaatatgaaaaacagcactaagaactgaactgagtttcaacaaatcaattaatactggctcatggcccaaatagttttacttacatgagcattgcttatctatattttatcagtatttatagaaaaacttacaagagctagaaaataaagtatatatatatatataatatatatatatattatatatatatagtgtgaattcccataagagaaaggcaaagccagaacatatattccattggcaaaataaaaacatgatatattttcattggattccagattattggtattgaagacttaattctatatagtattttggttgctgttgacaaaatagttaatgttgataactcacaggtcacatttggcaggcttccaaattaacccatctaggggaggtcttacaatttatgacttatatcctgtccttgattaaagaatcttatcctgagtctaatcttatcatggattctccaaactgttgaggtaccgattaatacatcatctactgacattgaaaatgacgctgatttgtttctggatcacaaagttttactgatagtcttgcacctagaatatttcagcctgttatgttgcaacctgtagccaatgattataacttctgtggtgaaccctccaattaaaaggaaactgcagtgtgaggagtccttctcccttattgtaaactttcccctccaacttgtagcagattctggaacatgcccaactttgtgtgtctttcctgatcaatccacacatttagcttttaataatgctgtatcaaattatttctccctcgacaggcttaattttggttggcaatgtatatcaaataagatcattaatgatgcatacagatatttaaatattataaaccaatgtttaaaaagaatgaataacatgttaatttatatagactatctgattacaaagcagaaggcatcactgcacaccgattaaaataaatataaaccagagtgtttcaaggtaaaccatatggtaattctcttgatggaatttccagtttccctccaggggtttttggttgtgtaatgatggaagaatgtctcacttttgacccccaaaagagagacttttaaaattaattaattgacgcttgcaactttgtcaatgatttcttttgctctgaattgaaacttctgggctatcatttaaaaatgaatcttaggtttggcacaaaatttgggattttgaagcctacttcatgagtgggggatgaatgtctctatgctgcataggagctgaaggcaaagacagacacacacctactgctctggctcaaacaactgaacatggtttcagttaaattctgaaagttggctgaagcagggtgattatttttatttttttatctccaaaaatagaaataaactacccctattatttcgtctcatgatttctgacttcagccccaccagctattaataaaaaatacaatagacttatctttcataaaattctttaggattaaatttctaagtgtactagttacaatgaggagaaggagcagaaggagaaggaagaggtaggtgttaaaggggagaaggaaaaccaggagaacaattagccatttcagcagctagtttttgtgctgctctctactatgacaccaatgttcattaagaacaagttttcatcaaacctctgatcaaagataatagtgttgagaaacttgccctaatcaactatcccaaatcctcatctgctccaagagcactttgtacatgcctttaattatgcacaatggcatttaattttgttttgttgtgctttctttgcttccgtatgatgagctgttgttgtcgtgagcacagtgtctggcatgcagcaggtattgtgtaactctgtgtggactgaactgaaagtctaggcaatgctacaagtcacagtgcttggcagcatccctcattgcagaggagctccctctcacttctgtggaatcttgtagctcttctctcatttggatattggggatggttgcaaagatctatacctggaaacatttgttcctaaaataaaaaggagctgcaaaaacacaatctaacctctgacatctgttctttctctccaggaggtcagaataatactggaagtcctccatctatttctcatcatctcactcttgagtgtgcactgccaacaatgtccctgaatgaagagccactgattacatctaagttttggctgttgaaaggaagttctacgtataaggaagtgcattggactgacagtcaggtcagcatctggattgtgctgtgagctctcgtatgtatcacctcatgtgatcttcgtgatcactttgcaaaatgtggattttgcaaaatgaggccacaaatagtcgcctttctccaattttctcatttctttgactttactttgtgactttttggattgttgtttacggtatgctacctaaagtttttctcacttcagagaagaggaagctagctaatgctgtcagtgtcacaggacacgtcatgcttacaatgataaggttaatatgtggcacacctctgacttgaacaaggcctgtttgtttacaaagtcaatggttacactcttaccctagagttctagtctccattctgctgccaattacccgatgacctatgtgactttagacatgtgaaataactgggttttttttacttttgaaaaaaaggaagagcatcaatgagataatttctagggcattgcttctcaaattttacatgaataaagataaccttgggatcttgttaaaaagtgattttttaattcagtaggtctagggtagggcttgaacttctgcagttctagcaagtttctaggtaatggcggtgcaccttgtccacagatcacacttccagtaacaaaatggcctttctttttatttgtttaagagtttgattccagaaagaatggtcactacaaagatagggataaagctattttctacccagtgttcttccaggtaacattagataggctctaatcctaaggaactaaagaagacctaagtcaatcagaagcatcctaacataattgttgtgttgatgagcagctctgcatccttaacagcaactgctacacagccaacaagctctcatgcatgtctcacagctccctgaattagattccaaagaccatctgcctatgccacaactggggatgactttccgtctgtacttagtatttctctgccttgcaataattgccaagcatccaagaagcttcagagccattaaagacagaaacacacacgactcattttctagagacctatgataaaagacaatagagctagcattatacaatgcagcatggtatgaagacatctttctaatgcagagcaggatttgtttagttttaaagccaagtatatcagcagatatactgcataaaatagagttgacgaggaagaacttggtgttacagactgctgggcccatgagttctctgttgcaacaaaatttaatgggccattgaggcttgaagttgtaattcaacataaacccactttgaaaattgcaatttgaagtattagtattttatgttattagaaggttttgctttgaaataatatttttaattttgcactggacattaggatatcaatacttcatagaaatgacaatatatgggaaaatgttgatgttgaggctggaggatgcctcatcagatttttttcccacatattttcttggaatacatttgataaatcatggaaataattcttcctttattattgtcagtaaattcactggtcccacaaatcgtatttgtaagagtgatattttaaaagggtcagaattttttttaaatgccacagtccaaattcatctttccattttggtcatttttatcttatacaagaaaaaaatactagataatgtgtttttgtttctctcttacataaaagactaagtcagttatcataatttacatgtaaattgtgagtcagaggaacatttctcagcaggtggtttttcagtgttagactatcttagcagagaagaaaggacacattgaacattctcttctcttccacattttcgatcatccaaggtagtgcctatctcagatagaagtcagagtcagcaagttagttggcaaatgggattatgggagctaagaaaagccagtgagcagcaatttgaccaactgctaatatagcattcctaaacatcaacaaaaaccaaaatagttctgccagaatttaaaatcactaatattaaaattttgattacacatttttttttcctaacaattctttcctgaggtgcctagttggcttttgactactgattggttacagtaatctttgtctctgctgtcagaaagtactaaagccaagagaaaaatgtatgagataaaccactttccttttcaaacaaacaatgtgaggtacatcatgccagttagtgactgccagaatgaatcttttgaaataaatcagcaattagaaatctccatgtgcacaatttttttccattttattgagatagtcttcacttctcttgtagtacaacaaaggataaaatggagacagagactcatttagtataatattatgtcctgtgctagagtatgggtatgccaaaagccaagaatttgagagtggactttggaagaatttaagaattagttttttgccttttcaattgggtgaatacgtataagatgatatataaacttgttaaaaataacagaaacaataaatagtaggtattattttcttttttctcctaaatatggaagccttaaattaaaaaaaaaaacagattcatagccatccttttcagtgtttcatttaaaaaattctaatgcatgcacaaagatagttaaagaacttttatgcaaagctcctttctaaggtggcttggcatcacaattgaggttttgttactctcttacatgttaaaaactgttaaccatataagtatatatgctaatttttaccacagtagttagcgacagtaggtaaaatattaaaaacatgccaatcaaatgaaatctgtatcaaaagtaaaagaaactcttgaaatatggtagtagaacttcagggatccatggaaaacagccattgatatatagcctgtctgtagtttttatatattccaaaaattttttgtgcctttctccaaacgagaccaacacatcatttatattgaatggattggacatacatgtagatagattagggtgggtaatttcaaaaacatcaagcctgctcccatccctcatttcacaatccatcttattattaatagttaatgaattagttttttccattacaaaaaaaaataccaagaaagaaaatgtttagcattacaatttcactgaaaggagaatgcattgcattaaattttttgtaaggtgtgaatgaccaatatagactatttctgaatagttgggtaagactaggtttttaaaaaatgagttgaaaataattacataataaaaatgttgaagcttaatgaatccttaattggataatttattttacgaactggtaaacaagaaacactaaagagctatttatttgaatcaatgaagtaattaatgaatgaatctataactcagtgtattgtttttgacattatcttgtaggatgctttagggttcctcaaaggtgcttcaggagcaaccacagggctgcttggggtgtattcagtttctccagcctttagttcaattcaaagcagttttacttccaaatatgcacaatattgagttttgaaaccatatttaagatagaaaaaaagatttgcagtcattgtgatctgaatgatactgtggtcatgcttttaaagtttctatgggatgtcagcaagatgtctctggctttaagccccctcacagaaagtaaaactagcaattgtctacagataataacaccttgtgaaaatccaagaacccagagatgatgctgaaacacctttctggacaccaaaaaaagaaaaaaaaaagcacattagaaggttaacgggatcagttttactctgactgtgttgccaatctcccaagcttacacaatgccccaatgagagaattcccctgggtttagtttcactaatggttaaaaaagagagcccaaggtggatatccagtttctccagtaattggaggtgcttcccaggaggcctagttctaccttgtttcatggggaatactcaggaaatcagcagggttagcccacctgtggtcatctagaaacaagtggggtaaggctcacggcaaccagtgcacagatgttggcagttgtacacaatagacagaagtctattgtgccagcagtgatgcccaatcagagagaatagccaatggcatagctcaaccacagagcctagctagtgaaccccaaaaacatggctggctgttctacctggctacagtccctagctagccactccacccagcctttggagacaagcctgagactctgcccaaacaggtaggcatgctgtgctcttacatttctgcagatcatagcctttggtcctgcctgactagaagaccaaaaagcacctcttcccaggctgagagcccagcctaagacccagcctgggcaaagaagcagacctgtgatcttacatatttgcagggcaaaacatctgggtccaaaagacaatggagtgaaactagcagcccaaccacagggcacagcccatggccctgccccatcacaggtcctaatctgcaacctcacttaaatacaggtcacagtgaaagaacaggtcaccaataccatctgactggggagtatcacttcaacatggagtccagccaccaataccatctgactggggagtgtaacctaagaccccacatgactaagggtggttgtgtaccctaaaggcagccctgcccaactgtagagtccaattagcagcagcacctgcccaggcaacacagcctaagattcagccctaccagaagtcattaagcagcctgggccagagaccctggatgaccacagaaccaagacactggtctcagtgactgcagaagcaaaccaagagttgcacttgaactcatagcagaggtgacagtcctgcccaactagagaacctgacatgaagccctgtcttccttaggtctctactgtagcagtgaagggaaacttcccatttactcttggagcgttcactgaaaaatcaactgaagaaaggtagattaataggagaaatggcatacagatttattggtgtaaacaagggaaatgtacagaatgattatcctaatgtgcaatgaattgagtacaggtggtttatacctttcttcttgggggagagggagattgagaaatgtggataattttaaaggggggtagtaaatgagttttaagggaatttaatgggcttaaaaaacatacaacagcctgggtcaaagtctgttgagtccacagagtaggcaatagtttgtgacaagaagtctattcaggtgtgttgacagacttcagtctttcttcttgtgcaatgagatcagttaatgaaaactcatggaaaggactacaggcaattgtttcttgctttggcgagtgtgaactttaggcagataaggggactttagagaacaacttcatcctgtgttttaggagaaagaattgggaaataagggaggataaaatgtcatagagaccatgaggcctctccttcaaagcactacattgtaggctaacagtttctaaattccaacactgtcaactggttcatccaaaacccaggatgaaataactggtgattgtctatttctgctgaagcaaatctataaagacaagaagaggtgagtgcttcctcaaaggcacagactggtgcaaggatacggaatcatgaaaaatcagagaaatataaaacaatcaaaggaaaccaataggacactaccaaataaaactaacaaagctccaataatggaccccaaagaaatgaagactactgaatgtactggcaaacaatgcaaaagaatcctcttaagaaagtttgatgaactataatacacagataggcacatgaataaaattagaacaataacatatgaatggaattaaaatttttgtttatttgtttgagacagggtctcatgctgttgccaaggctggagtacaatggtgcaatcatggctcactctagcctgaaacccttgagctcaagtgattctcccaccacagcctcccaagtagctgtgactaaaagtgtgcagcaccatgcctggttaatatgtattttttatttttagtaaagatgaggtcttgctacgttgctgtattagtccgtcttcacattgctaatgcttgagactgagcaatttataaaagaaagaggtttaattgactcacagtttctcatgactggggagtccttaggaaacttaaaattatggtggaagccaatggggaagcaggcaccttcttcagatggcagcaggaaagagaaaaagaaggggaaactgccatttataaaaccatcagatctcaagaaaattcactcactatcatgaaaacagcatgggggaaactgccccatgatccaatcacctctcactaggtccttccctcaatacctaaggattacaatttggattacaattcaagatgagatttggttggggacacagagccaaaccatatgattccactgctggcccctctcaaatctcatgtcctcacatttcaaaacacaattatgccttcccaacagtctaccaaattcttaactcattccagcattaactcaaaagtccaagtccaaagtttcatatcagacaagttccttctgcctatgagcctgtaaaataaaaaataagttagttacatccaagatacaatggtggtacggacattagttacatccaagatataatggtgatatggacatcgagtgaatgttcccattttaaataggagaaattagccaaatataaggggctacaggccccaggcaagtccaaaacccagctgggaagtcataaaatcttaaagctttgaaataatttcctttgactccatgtctcaaattcagggcatgctgatgcaaggggtgggctcctatggtcttgggcagctccacccttgtggctttgcagggtacagctctgcagttgccttcatgggttggggttgagtgcctgtggcttttccaagcacatggtgcaagctgttggtggatctacctttctggggtctggaggatggtggccttcttctcacaactctactaggcagtgcttcagtggggatctgtgtgggggctccaatcccacatttcccttccacactgccctagctgaggttcgccatgagggctctacccctggagcagaattctgcctggacatccaggcattccatacatacctgaaattcaggcagcggttcacaaagctcaacccttgccttctgtgcatctgcagacccaatatcacatggaagccgtcaaagcttgaggcctgcgtcctctgaagcaatggctcgagctgtactttggcaccttttagtgacagctggagctgcagtggctgcgatacacagtacaagtcctgaagctgcacagaggagccaggccctgggcctggcctatgaaaccacttttccctcctgggcctctggacctgtgatgggaggggcttcctcaaagggcttctgacatggcctgaagacattttctccattgttttggctgttgacattcagctctttgttatttacacaaatttctgcaaactgattaaattcatcctgagaaaatgggttcaatggagagcttcaagagaagactttatcaacagaagcaagaatcaggaaactaaaagacacatcatgtaaaattacccaggcagaagaacaaatagaaaaaaaataaaaagaatgaagaaatcttactgaacttagatgacgcaatgaaaagaaaaatataatcactttgaaaataccagataagaaaaaaggggaaaagggacagaaagtctatttaaggaaatgattgctgaaagcttctcaagtttgggaagagaaatggacattcatatttacgaggttcaaagatcctaaataggtttaacccaaaaatgtctacaacgaaacttgtaattaaattgtcaacagtcaaatacaaaaagagaattttgaaagtggcaagagaaaattaactttcacatacaaggaagttctcagaagactattagagaatctcacaaaagaaacctggcagagcaggtgagagtgagttgatatattaaatgtactaaaacaaaataaaacaacaagaacaacaaccaaaacactgccaaccaagaaaggcataccgagcaaagcagaaataaaggaaaaatacagaaatttctggataaacaaaagctaagggagtttataaccactagaatgctaaagggggcatttcaagctgaaagaaaataacactaattagtaacatgaaaatttataaaaagagaaaaatctttagaactatcagaggacaagcccaattatctacaaagacatgacaataagaactattgctgacttctcatcagcaacaataaatatcagggcacaatggaataaaactgtccaatatcaatgagacagacagagagagagagagaataaaagtacaaaacctgtcaatatatgtccaactcaagtaaaatatcatgttgtctaaaaagaagacaaaataaaaataatttttgaggattttgtcagtctaaaacttcatgaaaacacaattaaattttagcaggagaagcatgagcaaaggaacatgagcagtgggaagaaaaaatggataataaattgatgaaacatgctgatgaatttaattaataatagcttttaaataattaattttttcaaagttgtaaaagtttagaattaaaagttttgaccatataaagcaacgagagaggaatattgaatatacatactaattttgttttagtttttttagggaggaagattacaagctattgcttagtttcacacttaagaatatttatagttaatattcttacttaatattcacacttaagaatatttatagttgatattaaaatgttaagtgtaatcattaatgaaacaaaaataagaatgaatattttctaaaacactgaggagtaaaaggagatagggcaagtatataaattttctgaatgctgcagaatgaagaaaaagaaaataaactaggaaaagctttgagaaacagtaaacagatgatgtgagaaagccaaacaacataacttcattagaactgttgttaatatatcaacatactttattctagagacaaatacttattatgtcaaatagaagaataaaaaaattcatcaatgtgtacttgtaagaaccacatccagaacaaattcacatagaaagacaggtcacactaatattaaataataatagctgttttgagaaattaatatcagacaaaatagtacttgagtttaaaaaatacaccaataaaaacatacatttttcaaccatacatagaatttaaaaacatttatgaagatttcaaggaaaatttcaagtaactaccaaaatatattccacagccaattttctctgattacagagaaaacacattacagttttcaaaactgggtttacaaaacatatgggtaaaacaaaatcataattaaaagtatacaatttaagacagataataaaaattgccattaaaaagtatagcatacaccaaaagcaatacttacagggaatgttatagtctttaaaatactgagaacaagaattttataaagatgaattaagctttcaactcaaaaaatatacatgtatgaaatagtaattcaaaggagactaaaggaaggaaatataaaaacagaaactaataaataagaaacaaaatttaatcaacattaatgagtaaaaaatattgtaataaatcaataaaaataaaataaattcaatcagtagtaataataaaatattccatcataagagattacctagtgagtaactgttaaggtttaccttgatttcacagtatgtattgttttatatacattgtttcaacaaacagaataagagcatgtattttgtgaggtaagcctcattaacaaatccaaacaagtactattcaaggaaagaaaaattgacactaccaagataaaaaatcttaaagtattaggaaatgaaatccaacaatgtattgatgaaataatacttcacatacgagtgttttaagaatgggtcaaaatgaagaaaatctgtcattgaaattcacctccttacagataaaaagagaaaacagacaacattatctcaataggcgaagataaaagcttttgaaataatgactaataaattatcgtaattcttagttaaatatggattgaagggaacttccctaaagcggctaagcataaattgtgcctaccaaacccatgtcttttctttctgggcacccaggtggatatttcccagcattcattgcagttatgtgaggccatgtgatcgagttctgccaaatgtgcaccactcctgaatctagcctataaaatcctttcactcattacttggtctcttcttccatctgtcagctagatatcactgcccagaataaccttggatgctaaagattaaaagtagcaaatactttaatggtttatgatccccaaataactataatagcataaatataatgtgtagaataataaaaatgtgttttatttaactgaaataaaacctgattgcaaagtgagataaccccaggtaatggattgatacatcaattgcaaatatatagatgttgtctctgaattaatgcgtacatttaattctagttgtagcaaaatttgaagaaaactattcattaaatataatagactaattttaaaaaacttatggaagaacaatgttaaaacagtatctgaagtaattctgaagaaggaaatgaggaggagggctggtctcaccacagagaaagaaaatttatgaagctttactagttaatacaatgtggtcttgtcacaggaataagtaaatagaccaggatgacagaacaggagtttcagaaacagattacagcatatatgagaactttttgagaatggaggaggtattagaatttaatttagagactgaagattactcaataactagtattgttggtacacttggccttaaatctccctataacacactatacaaaacatgtatctcagaagatgtatgtattcaaatgtgagaaacaaaaaaattagagatatataggaatatggttagtatcttgaggcataaaagaattgtataaagaaaacacaaaaatcagaaagcataaagaaaaaccttacaaaatttgatcacaacaaaaataaaactactattaagaatgagacaataaacaaaattaaaagtcaaaatacagattgttaagagatgtttgcaaaacataaaaccaacaaggtatgaattacacttacaaatatttaagaaaaggaaaacaattacaaagaaaaacaggaagattgtgaaaggacaactcatagaaataaaaataaagatagccaataaacttatgaaaaaatatacagtgtcaccaataatttgggagtgcaaacataacacatattttaaaaattaagtactattcaatattgctacagatattaaacagtgacatttataccttgattttggcagaatatcaacatttgaaaaattgtttggtgatatttgataaatatgaagatataaatatactttgccactgcaattccatttctaggaaaataccttgtacatattcagaagggagtatataaaaatgttgataaaattatttgtaataaaaaagctcaaatgtccatcagtgaaatacataccacattcatgatatttcttttctctggagaatgaaacagaaacttcaaatttaatttttaaaacaaaaatatctgaagcaaatatgttaaaatatgtgaagaaccatagcaagctgatgaagttcaaagactgtagagtcaagtttttcagatccaaatcccaggctatatttacaacctgtagcactcaatctccccgtatttcagtttctatatctggattaaatgaaattttggtgaggattaaattagttaatataaacaaaacacatgaaccatttctgacatatcatgaaataactataaatggatagttattatttttaatttggctccaaaagtgagtattctattattagccgttcttttctgtactttaaaaaagggggttagatctttaaatattaaaataataaatctaattcaacgttttttatttatatttaaggggatagagatacaaaatagcacattcaagtccccaatggtagcactttcaagaagagcgctcgttttccctgacaaactctgtgctatttcttctgtcacatactaccagtcaccttattttctaagcccaaagttaaactgtatttatgatctgaaacatgatctgacatgagacttaatattggaaaccaagttgatcttatgagaactcacatatgcaccttggggtgatttgttatgttagctcattgaattcctaaaaaaatagagttgaagggaaaggtgagagggaaaatgcacatgaaagagatgtttcattgtttatttacttgtaattccctttttaaaggtgtttttatccctcaatgaaaagttagaaaaaggaaagtgttaatgtgtgcgtttacagaggcccaggttagattctagttcattaatgcatgtgagtatgaagtcaatattggctaatggtcaagaaattgttgagaccttccatttataattctgatatttcttgtgcctcttcttccttggtttctcagtccctgctttgtcctagtactactttattttttccatcagttcttttaccgcctcccccgaccccctgcattgatgtcacatgtcctcctaagccctgcatcctaggaaattccagatgactcactgtattgagtcagatggtagaccatcaaaatggtatgtctacctgtaacctgtgaatgtggccttatttgggtaaagagcctttgcatatattattaggttaagaatatctagatgagatcatacttgatttgtatgggcctttgctccagtgacaagtgtctttataggagaagggcaggaaagaaaacatacactgtgtcagttgatgtgacagctgaggcagggactgtgtctacaagcccagtggcaccagggattgccaatagttgcaagaaactagcagaaaggcatggaatggattctcccttatagtatccagaaaaataaaataaaagaaaagaaaaaccctagctaacatgtcactctcagacttctggtttccaggactgtgagaggataaatttatgggatttttttagtcatcagtttttgataatttgttaatatgagccctaggaaatgaatacatctacccttgtcatcctactaacttactgggatcctgggcaaaggggaagtttttctgaggagttataaaaagatttcggttaacacaagaaaatattgagagaaacttcatgccttgccaattatcttttagactctcaaggatatgagggtggtcaggagcccacaatgaaaagatgcaaacccatgtctttcattaaatactgttattttgcaaagaaaaagtaaagaacaggtaaggaataaagcaggagtaaggagaaattgaagtgaatttttccttgctgtcatttactgagtatgtcaacttgagacacatttaattttaaggcttggaaaaccttattcctattttacactatttttattgctttaactcacactaccaaaggagctacgtaagtggaaactgtcaatcaactaaaaaagagtcatggtttccatagtaaccttcgctgttcctcataagtcatcatgcatgtaaaagtgaggggctgactgcggaagtaacaaggatctcttgtgtcttaaggaatttcatttttccaacaagaccaaagaggtgaaggggaaattgttcataaaattggcttctaagacctcaagaaaccacgaggtaaaaataagttttatgttaactctcactgattctcaaaactgataagttccattataggttccaaatcttcttacagttatttataagccattaattggcatacttatttattattccctaaagttttatcagtatgagacatattaaacagaactacaaacatcaatgtcaaaaaatcagtcatattattgaagaacatggttattctcaagtttactttaagaattgccttagatgcctatttaaaattcatattatggaggatcaccactgatctgcagtaacagaatccccatgtggggcctgggcattctttttttaaaaaatccccacctgttatctgatgcaactggacttgcattagtttcgacgtagttccttaaatcatgcatttagacaatggaagtcctttataatatcaaggaagctgtcctcctgtttagtacacagttttcccaggtcaccacagtgaggctcaacagctaataacacttattgcataagagcacacggcagggtattttgcaaggttatcacattaattctaacaaaaatttcatgaaagagggaatagtgttagtctcattacagaaactaggagaataagacaccgattacatacatacttgcagcagtgaagtacaagtaactgatggagttgtcaaacctaagtttgccaagctacaaaaccccacagtcctttcagtccttttataacggcctctagcttcatggtcaaaatagatttcttatgattgaaaatgaaacaagaacaaaggcatacttctattcaatataatctgtggaggatggcagagtgtcccatcccagggaaagggaggattaaaatgtaaaaacatctaattttaataatgacaccaaattgcatacggttgtatagttttttttaaatagtttttatataaaacgtcttattagattctttcaacaaacttctgtggtaggtaggacagaggttatcagctacatttatagatgacagcaggatggctcagaaaaaaaaagcagagggagagagattttcaagattgcattgacagagacaagacttttaattatttactttttctaattctgtccattgtcccagaacgtatccttatcttttctgaggatggcatcctatcttcactgttaactccaaccccaatcaattagggtatctgattttcagaagccaacattatgggggaaaagactagaaatgacagtacaataagaacatggacttggatttcagattgagatgtgagattcagctctgcagtatactaactatataaaagtgcaaattaaactgtaaggctcagatttactcccatgtaaaacagacatcaaactaatatcctacatatttgagaagtaaagcatataaaccacctatccaagtatcctgaaatcacttactatagatgctggttgtagtatacttgtcactatcaccatgattatgaagggagcaagggatatgtaaaacagcacagataaagagaagacagcagtaagccagggtgctattccacagaatgtttggcagagagtcaggcatgtattattttcctctctttgggaagacagaggtagcctccactccaggaatgggatgagaatgctttgtaagaagcactgaggggtttaataaaagcttgattaagggacagtaatgtcagcaagatggctgactacagatacttggcattcatcatcctccacaagtaaaaacaaaggcaacaaataaacagctaagatttgactggagtgttgaaaggagagtgctagagtgcagtgggaaaggggagatacacctgtggtgattacaagtccagtagtgcagtgtggaagtgcctgacctctgcaactcccatctttctggcctagatcagatctacctggagtcaggagaaacttcctgttgtgatgaaaaggtaagcagaagattcccaccagctcccattatcactgtaagcatctacaatccttataacaggagacttccactgtctcctagttggaagagaaactgaacattaacacagctgcattgccctggattaggagcacaaagtgtgcactccccacttccaactctgcctgtgagccaagctgctgcaggacagtgccaccttgagagtagagccccctttggaatgtgtcctgctttgacgccaatagcccctgcacctctccagtacagagattccatcttcattatgccaagcctatacaagtgcttaaatgccacaatcccaggctgagcatggtggctcacgcctgtaatcccagcactttgggagaccaaggagggcagatcacgaggtcaggagatggagaccatcctggctaacccggtgaaaccctgtctctactaaaaatacaaaaaattatccagtggtgatggcgggcacctgtagtcccagctactcgggaggctgaggcaggagaatggtgtgaacccgggaggtggagcttgcagtgagccgagatcatgccactgcactccagcctgggcaacagagcaagactccgtctaaaaaaaaaaaaaaaaaacccacaatcccagctgcacagagtttgtgcacaggattcactgcgactgcaactctggtcctgcacagcaaggaaacaaatcctgttgctgcaatttcagcctgaggaacagtctgccagtcctgaccagggtgaacctgcccttgagctggccaaactactgcataccctctcccaaacatgagcgctccctgagcctctgagtaactgatataccccctaggccagtggggaatctagtcacccattttcaggacttgagaacagctctgtagtatccctgttcccagtagctacacccctagcctatccaatggccttgtgcccaaataagggcctgagaaacagccccacaggcagctactggtagtcatacccctaatcctggaaccagtcaagagcccacatccaaaacctagaaacagccctatgaacctcccctggtagacacacccctgagtttgtcaagcagccttgcacttgtgttccagacctgagaaacggacctacgggccactcacagcagacatgccaccaggctggttgagcaactgcactcccatgtcccaggcctacaaagcagccccatgggctgtaccctgcagaaatgaccccaggccagacaagaagttgtgcagagaaatagccctgtgccttcacatgcctgagaaagagccctgtgtctccttctagtagaaatacctgtgggttagtcaagcaaccctgtgcacatgtactaaacctgagaaataaccctaggggctactcctagcagacatgaccccaggccggccaagcagctgtacattcccaggacaattaagcagtcctgtgtccacatcatggacctatgaaatagccccatgagtcaccctcaccagacatgcttcccaggccagttgagcagctatgtcaccacatatcagatctaagaaatagcttctcaggccctgggcatgaccccaggccaacaaaggagctgagtgcctgcctcctgggactgagacatagccccagaagctgctcttggtaggcatgctcctaggccagctgagcaattgtgtgtgcattgctcccagagtaaaaggcctgtggtcacagccgtagcaagccagaccctaagttagctaatatacaacgtgcacacatatactccaacctgagaacagcccagtgagtcccattctggcaaagttgcaccatcatcaccacaaattctctcagcctgggccactgagaaactcataaatgccactaatgtggattacaggtgaagaaactacatggagactacactactgcatttacctagaatcaaggccaacgcatcccaccaaagaaatactgtaagacatattcatacaaataagaattcccctatgaaacctacttcataaaattggaagggatgtcttttacttcagatgcataaaaatcaacataggaacacttaaaccatgaaaaagcaaggagatatatcaccaccaaagaaaaacaataattctccagtaatagattccaataataaggaaatatatgaaattgcagaatatatgaaatatatgaaaatccagaatattgaattctggaaaagaattcaaaataataaccttaaaaacacagtaagatacaagaggatacagacaaacaattcaaagaaatcagcaaaataatttatgatttaaatgagaaacttgacagagatagatatcattaaaaggacaaaacaaaaattctagatctgattttagtgaacgaaactataaaaaaaaatacaattgagagcttcaacaacaaactagaccaatcagaaggaagaatttctgaacttcgaggcaggtcttttgaaataacacaggcagacatattgagagaggggcaggtgggggagagagggagagagaaagagagaggaatttaaaagaatgaagaaagcctgcaggatttatgtgacaccattaagtgaacaaatattcatattatggatattccagaaggagaagagaagggaaatggtgagtaaaatgtgttgaataaaataatagcagaaaacttctcaagtcttgagaaagagagagacatccaggtccaggaagctaaaagtattaaaaatagactcaacccaaataaatcctctctgaggcatattatagtcaaattgtcaaaagtcaaagaccaagaaaatatttcaaaatcagaaagagaaaagcatcaagtcacatataatggaaacttcattagactaacagatttctcaacagaaaccttaaaggccaggagagaattaaattatatactcaaagttctgaaactaaaaaaatacaaaaatgctgttaaccaagaatattatacccagaaagctatccttcagaaataaatgagaaattaaatttttacagacaagcagaaattgagggaatttatcacactaggccagccttacaagcaatgctcaagaaagtcttacaggcagggtgtggtggctcacacctgtaatcccagcactttgggaggttgaggcgggtggatcacctgaggtcaggagtttgagaccagcctggccaacatggtaaaatcccgtctctactaaaaacacacaaattagccgggtgtggtggtgcatgcctgtagtcccagccactcaggaggccaaggcaggagaatcacttgaacccaggaggcagaggctgcagtaagccaagattgcaccactccagcctgggcaacagaacaaggctctgtctcaaaaaaaaaaaaaatcttacatctggaagtgaaaagataataaccactatcatgaaaaacatgtgaaagcataaaacttaattgtagagctcatacacacaggagaaagagaaagaaatcaaagcttatcactacagaaaaccacccaaccacaaaaataaactaagcaataagaaaggaaggaaagaacaaaggatataaaaaataaccagaaaacaacaataaaatgacaggagtaaatcttcacctattaataatatcattgaatgtaaatggacgaatgtttgagacaatggataataattactctgatctgagagctatacattatatgtacccaaacatcactacatacctataaatacgtacaattattgtcaaataaaaaatgatttttaaaatgcctgatgagttgctccatctagggtttgggaagaatggcataagtgcttttggaggctgtcagcacaatttgctttgcttttcagtgttggttccaccgagctgaaggggaaagctagcatggctggctgcttagggctgctcctagcttcttgctttaagaagaaatcgattaatgagaccttcagctttccttttagttgctgtagcttgattcaccaagctaggcaagaaggccacactttagggcaacagccctgactagaataacaaattacgcatttctctcaaataacttgatctccactgggcttgggtctagaggacagagaacagagagcgggggaaaaaaaagaaagaaaggagaaactaaccttggttcagtgcctagtatgggtcagcaatgtgcttttgctattttatcttttaagactcggaataagcctgtaaaagtggtgtctggccctgttttacagcacagtaaactgagactcaaagagtttaagtgaatttttcaaggatttccaataaataattattgagttggtgtcaaaacttgtgtatgtctgactctgaagcaattatgttcattataccatgctgcctaatattttgtacatcatgtgactgttgttttaaattttcattaaatagaaaattaaaatacaatatttagaaatatatattttaagcagaatttctagctccagaattaaggattggctattattatccttcaaggattgtgatatttttctgtttgcattttgaattctaagaactgaggtctctctcataaattactctctgaagaactgcaaatagctgtgaataatactccccctgctcacgacctttacatgctctcactttccgttgggattcaaaaacaatgcaacaaagtcaataaggacaatgatagagcaaacaaagccacctggcttgattgatctttccctttctttattcccactgctaactccttttccatataacactttacaatgtaccacatctataattccctgccacataaaaattactaaggacataatgaatttcaagcacaaaagcacctaattctcacagcatcccagagctattatagtggcaatgacagaatttataaaaagaaaaattagcatagctcttctttggaaacaaggctagtgtcccaggcatacacgagagccctagatttcaatatttgaattgcttgtatctctccacttcaacatttcaaaataatgtgaccttagtttaaaatttaaaatgattctaacaaataatatttattgaggaatatctgaaaatgccgtggatggggataagcaattgctcctttatgcgtttatgtatgttttagttttactttggctttacgttcatgtcacatggtggtctgtaatacctttgctaccatgttctttctcatctctccattcaagatgtgtttgaaacccaagagaagaaaaaaaagtggatttattttcaattggctttagcgcttgcatgccttgtatttaagacgttaaaatcagaacattagatagatgcctgccagccaaggcaattacttctacccattacacttcaagaccaaattattttagtacttgaaacagtttctcctaattgtcttatgctctgcacagtgacattaaacccaaatagtcacttctttagttttattgacagtgtgtggtttgaattatgggttgttgacagtgtttttggcaatcttattctcttctatttattttgtttcctgctttcatttgtaatttaatgttgttagggacctacctaaattaaagtttgtttgccttatcctttcactgttgcttcagtaggtatatgattttaaaatttagaaggcacatctaatgaaactgaggatgagaattttctgctcttaatcttttcttcaactgtattgtccaatggagatggacaatacactacccacatgtagttatttaaattacttactctacttagaattaaacagaattaaaatgtgagcacctcaacaatactgggaatgcatcgaatactcaatggtcacatgttgctagtggctactgttgtgaactgcagagatgtagaacatctgcatcttcactgcagaaaggtctatttaacaacattgcctcaagggtctcttctacatgaggaagcaactgttttttcataaagaactgtaatagagagtcaccaaaacaaacacccagaaaatcccctaaacatccttataatgagacaggcttatcagatgtttatcaggctacaggatatgggatgtaacagggttctggcttgtgtgtaatccatgtgcatcagtggaattccaagggccctccacatatttatttgcaccaggaatcaaggatccagttaagaaagggacagtaagagggtctcattattgagagtatgtttagtatacatggaggtgatagaaatggaaggagagggaataatttggaacactgttgtagatgaaatttaaggctattgagttaaggcctgcaaatgcaggctccttaggggagagatagttactcataaaaaatggaagacatgcttatcaagatttataaaatgatgggacataagaaacggacttctaggatggatccttggagtatattactaaagaaagcagggattccttaccaatatgctttaggcactggggaaactggataactgtctgtgacagaccatagagaacaagaccatttgttagcgagggaatacagtgtcccttggaaccctggtcacataaagaaataatagctttgggacatcagcaactgcactagagcctggcaggaaacacaaagaccaggagtggcatctagttacctcatagcacagggtggaagttaagagatgccatacaaagaaatgctgaccacttctcagtgcttattactatgaaaaaaaagaatgatacattttactttccatcagagaaggactatggtttaatacatatattattatttgaatatatagttcctgggatagttgaaatggacataataatttaacatattaatttaaggcatcattacactaaaatgaactgatatttatgtatgtctgtacaataaagccttggtaggaaataaatggctgttatgtaagtaattcctcctttctctttcttacttccacattttgccattaagataattggacattttaaatgctggtaaagaataaattattcaacaatggtagattgaggtgagatttatcatctaactccaaacacctaagataatctaggaaatattttgaatttggagattttgcaagtacacctatgaaccaaccctgtgactcactcagcagtcagtggcattacaactgaattttaaccctctcttgctgctgtcctgctatactactcattacaagaagtctgggactccactgaataagcattgaggggtaaaagttgaaactaaataattcaatctgaattccaatcgaatgggtggggggtgggcaggccattccttcccttctgtcctcaaatgggagaatcacataaagatttttatttatttttttctccctctccctgacgttaagaaggtctaagcacttctcagcagcaggtctttcctaggtccatcatcagtttgccatgcagcataagtcctaggtcaaaaactctacatatacctcaattttcttataattaacatgcaaataacaatccccattctacatgtaacaatctgaatggaatacaaggaaaaagaaccatacaaatcatgttgattgaacacatgctaagtgtcaggtacttttaccaaagcatttcttttaatacaacttcctttaatctgtgatgtgccatgagggagatgtgtggtagccgtctgtccagcatctgaacatgtctcttagtttgggagactctcaagataagaggaagctaggattcacctctctctatcaaagtctggggaatggggcatcagatagacctgtcttttgtcccttagaaactaagtaagggacagccagggtacttaggcttgtccatctgcctacaaaactgaatcttgagggagttactcaaaggtgcagggactgtttgcagttgctgtggcagagactctgcaataataacccatccactgctccataaaacttagtgaggtcagatcgtggttgcacctggcttcttttggttcctgcccattttacttcccaccttcctaaagcttctaggggttccctcatattttaccaataaattaccctcctctttaatttagcgaaagtcgtttctgcttctgtcaccaacaactttggtgcaataggaattatcacctatgtttttgttctgttagacttttgcagtgacatcctcaccaaagctgttgatgtgttcactgagtgttatacaagtggtagacagctcagccaggattaaaacccttacgtatgtctttcaaaaatgaatgttctttcatctcggataggtatttcctttctatgcttttttatatttcttattcttctttttgcctcttctcaagatttctcctttccatttaaataatttttggttcaaataagaatatcaaattcttttttttctttttttttttttttttgagatggagtcttgctctgttgcccaggctggagtgcagtggcccaatctcggctcactgcaacctctgcctcccgggttaacgccattctcctgcctcagcttcccgagtagctgggactgcaggcacccaccaccacgccgggctaattttttgtatttttagtagagatggggtttcaccgtgttagccaggatggtctcgatctcctgacctcgtgatctgcccgcctccgcctcccaaagtgctgggattacaggcgtgagccaccatgcctggccaagaatatcaaattcttataagcaatgtagtttttattcttagcatgtattcaccaaagttaattctagattaatacttagaggcttgtaaatccctgttagccatagagtgtcatttcaggaatcttctgacactaagaacaatacatattgacctatcccataaattatttcaagttcttcagctacatcttggtagaaaaaaactcagcaacaggagtctggctatagactatgttataagcatgtactgctcatataataaaatggaataatgaataattggttggcatatattcaaaacccagaaacagcatgaaatatttgagtggtttgttctgattttattgtacatccctttaaacggtaaaggaatcttaaaatgttttcaagttaatgctgaatttgaacaaatggagaagcatttttagtaaccaggttatcagtacctgaaagaaatagaaaaactctaagtatggggattgcattacatccagaaagcaaagactctcctgggctttgtgacagaatgtgtaagacaagcagaaaatacaagttcatcctgacagctgttagagagatgtccaaaaagaatgtggatgtcaacatgtattcacctttttgcaaaggtgtgaagcaaaggtgaactctgatgaaaagcttgtcaaaataagaagggttagggactagagtgtttgtcactcagcctggctactattactaaatggcaggtagagaagagtctcatgcctatctgaatgaaaacagaggagattataaagatgctgaacaaacagggctttgattgctgggagtaagtgtggatatatcccggggccagctgttgaatagggtataccaatgcctcccaggcatgaataaatgacgaaggccaggctaacctgagaaagttatgatgcttagtttccatgtagtagaaatggtacgaaggaaaaataaaaggtctttttctgttgaatcagaatgagaaaaaacacaaatttttttcttttattttatagaagaaggcaagaaatcagatatcctagttagtctatgcctttccagagaacacagtacccaggacaatgctttggagagccaaactctgagttgggttctaatgagaatgccaactctgctccttcttcaataaactagaagagattcaatacacatcatgctagttatctttcaggacattttcattacctgcagctatagaataagagttccaaaacttcagtgtgcctaagattaaccagcagagcctctttaaatatcgattcataggcctggatagggctcagtaaattatattttagcagacaccaaagcagatcctgactctgctccaggaacccactttactgttatggaaaatcctaaactctgcagccaaggagaccagctttactactgtaatttccctcagctgaatgcaggcacccagggagctgtcatctataggccacctgctcagtcaggctctaaccaccaggcactccttttcttcattctccctctaagtagagctgtaggagcactggctttggtgtttgcaaatcttactgaatacctctgcttcttaaggttgactttggaatagcaataatacctaagacagtctctcagggcccaacacttggtactagtatactggctagtttgccaaacaagcctgttgagtgaccttgtatggagaatacagatataattctggactatgtgtgtcaggtctttatcattaatcatctcatcacttcttcctaggccgtttattattctctctctgctttatatttgacccaacacactttacggctgcttctggtaatggcctcttcatccacatagatatacgccgtactatagatattgccaaactttatccatttccctctaccaatctccaagactgctaaagcaccttgtatatcccaatgcaaagtatcttttgtatataagaaaacattttgtttatttaggggcttacatcgttccagttcagcaatcagaatacaaaatgagccttttcatctagcttaatctaaaaaatcatgggaaaagtctataagagggcaaatgtggattaagtgccttccgctcgggagaaggagtcgtgttttaaccaggcagaggacagtagtggagatgtcactatgaggaaatcacaaactcagatgtcacaatgacaatttctgacaagactcaaagaggattagaccgaatgcttctcctgttttagatacttcccttttgtcacttacactggctaaacttgagttattcagttaagcaggtactttcaggggaaagctaggtagttccccattcttgttttacttctaagatacaagatgctgtgtacgcacttcaacccagaaataaacaagacctgctcctctgttacaacattagcactttgcttgggagaagccattgtctaatcacaattgaaaattgttatttgctatttcggaaccattacaattgtcgtgaaaactgtcaagtgtaattttaaaactggtcactgaatatctatgtagtaggcagtttgctatagattttccctagattatttcattaattctcacaaacactctgtgaaacagatggtgtttttaaaataatttcaaaagaaaccatcttatatgttaaatgatttgctaaaggtcacgtagctaatagatagtacatgaaaaatgtgaactcagttcttgatttcatgtccagtactgcttctactatattacagttgttttctataagtgtaacacaaccactcaagcataaagagagtaaaaggcaacacccaagccatacattacatagactgcttttaatctcagccatgctacatttttttgcacctgtcccctgccatggatgatttccatatctaaatcttcatgagtagtagctttcttcacttatttctattatccaatcccttattttccatgcctcactggaaatcccaccttcctgagcactgaaaaagcttcttttgccaactgtgccatttctagcttgaaactgtgaacttatttttgatcatttcctcattcattttacaaacaatttttgagtacctgttatgacctctacttcaactcttatatttaatcgacccatattctttctcttcgatgaaatctttgtgcttcatctttgagctcactgcttgatttgactaattcacttagttatctgctgcctacaatttactactgggtagtgtggtagcccttggctgctctccttgtcattaatgtactatggaaactactgccaccatctttcactaaacactcacacgatttggggctcaatttatacattacctcctctgggaagtctttgtctctctagactaaaccagttgctccaaactacttcactcgagactttaaaatagactttaaaaagattgttttaaaagaaatgtagcaaatggttatattgcggtgattttaaacataaacctacaggacaaatgaaaaccaaaaatttataataaaatctaaatgcattcttatggcttaggaaaaattttccaatggccatacacatggatgtaaaccaggccatatctcatattacataggtaaaataaaagaaaacatgctctagagacctgccagacgactcaaagtgtaacacgaatggtacaaaatggcattgatactgaagatgagtgtgagaataaaagaaacaaacatttaaaaattaacatatgtgtcctttatgtttaatgtattgaaatacagttttgtaagtaaattggtaaagcttgtgttttaagtaaatatatggaaatttcacttacatcatcgaatcattacatgtttgagtcagccaaaaaaattgcttctgttttagtattttacattatgactttggagtatttctctatattaagtgggctgttattgacaaacatatggaattttgacagccttagagaaagaattagccctcataatccctgcccccactttgcctcagggtaatataggaataaccacttcttaaaaatagaattggaaacagagagctttattacataaagtgctttgtgtcctttatctcactttattctttcggcaaccccatggaatatgtactgtatctattactatttcatagattaaaaaactgaaacagaaagtggctcagtgtaggcttcatcaccagtaaatgaagagatgagattaggcccaggttcttactggagaactgaacattttatctccagtgctgtattagcatgttgtttatagaattaaaattcctaaagggtcatggaaacttcagctgtgctgagatactttgaatatctgacattaagatagaaatttgtgaatacataaggttttgggttaacactaaatatcctcttagtgttagacatttcactgacatttaaagcaatgcttcttctgtcactaggctttctcactcatgaatctactttagccatcaatttaaaatttagatgctaataaccagcatgtgcttctaataaagcaatgggtatgagccttcaaggacatatcaaaaatgcctagccatctggaactgattctttttggtagcaaatccctttccacaaaaatacataatatggattagctcttttactttccaaatgttatatcctaaaataaatagatgcaattcccctaatagaattgtgtctgataattagtgatttttgtcttaattcatatataaatttataatttgcaaattatccttattaaacagttcttttaattatttccaggccatttctttttaatagaaagggttaacacgacaagttagtaaactttgcttgctcttctagtagcaagaaaaactaccctaattttcatctctgttcagcaatctgctgtttgttcctgcaaatgaaagaatagctgagggctttaaaaatagatttgtaggaagttggaacacaaggttccaagattaatgaaactaaggaaaaggagactctaagattggatttaacgcagattttgcatatttcatactaataatacgagaaaatgagtgtaaaatctgagctccagctaatcctctgcaaccgtctgagcaaacatgaacacaatgccattctgaataatatattattgtcttaggagtcctattgtcatcaaattctacagagcacattatactaatctccataaacaagatgtttattttttatggggctatcatttagcacataattataaatctaagtatattagaatatttagacacaattactctcttttcaaccttctgaatctgtttggaggtagggaaggagggggaagagcaagtttgcaattttatgggagaaggtctgtgtggcatgctgggaattgctattcagctcttatggttgaatagcactcattttctgtgactaaccatcagctgggttttgtgattgggcttcaatatgagtatgatagccaaaattgtaggtttttacattagtaaatacaatgctgctatgttccacattaaggatatgggagaataaattacatcatttgttttgccacagaatccttgtgcaagatgctgttttaagaattattatattcatcagaagataaagagaataattaagaagagaaacaatcttctaagagttcataatgggaaaaatataacaactatgcccgctattaatttttcaccagatcatatgtcttcaaatctttggaatcatgaagtgctaggaagagccccgggtttacatttaactctttagattgttattgctagctacgacaccttaactgttctaaatccacttcatgtgtaacatgagatggtgatgtgtctgtcgcatgatgcatgtaaaaattaaataaggtaaagaaactgcctatgcacagtgttcagcacagaacaggtactccacaaatgctgaatttgattatataaaaagtcaagatttactagcaagatttaccgcatataactttcccaaggtgcaaatacacgaagtgcaaagggcactatttggacaacagccagagtgattcacaggaaagggtatcaataccccttaagcaggttgagcatacccttatcatgtcagggaggaattgtgttatatcaggacttttgtccttcctatccctcatagtccagggaatagtcttagaatattacagagtagccccttttgccactgccagaatacagtccaagggaacagagtcacctgcagtaaatctcatagtaaaatgacacacacacaaaagaagagttcagagaaaataaagttcccttctgagaactgtccatgtcctacaacctacatcttaccaagtctcacccttcctactcagattctgtctggcccacattaaagagaccacaggccacacatattaaggaagcaaccagatctctgacttctccgagttgaccagaagacagagacagaacactggctgaaatgtgaagaaattagcaatcttctagactatcatcacaatggaaataagccctcatgcaaagggtaatcaatgattactatcacttgtgactatgtcaaagttcaggacactaaaagaagcatttcacagtatatgtgatagacattagaatttgtccattgccttgattgacagtcactttacattcttagtttgagttttcctcatctcccaatatcacaccctaacaaggacttgtgaacaggtcatttatctgcaagatggtctgctgaagcacaagtgaagaagggaggacagtagcgccagaaagggagagaatacagtaagaggtgctgtaataagcaggttgccatggtaggctcaatcccatggggaaccctctgaggaactggttagaacacatctcataattgtctcatgaacggctaaagaagtatgctatttacctgcgaagtcctgtcactcattcgatgatggttgcctctgggggcaacattcaacccaacattttctaggctgctttgctgtggtatagcaaactcctagggagctagagaaaacccttgggattaaaagtaaagaaacaggtgtgcttgaaatggaaagcagccaggatgaatagggactacttaccacagtcaggcaagcacagaaagggtcaatggcatatgtgtctgttgcactctctgtatgtcaaaacaattgaagcagtctgatcacacatagctcgatatgtgtatgtacatacacatgtatctatatatgtataggtgcatgtaatttttatcattgaaaaacagttaaattagatggaataggtctatgcccctcctccttcttagcctatttaagagggagcctcctccctcttagcccactcattcttcatacatccattcaatcgtctgttattcagggaacccttttctcatccctttaactaggtccaatttatcttttttgtgcatccatagaaaatctatcttttatgatagtggcactaattagagttgtacttttattatgagttgtctggtaatttgattaacatttctcttccatgaggatcaggtccttgaagtcaggaaatagtgcctttcagaaggcttccctcctagaatgtactaaatggttacacactgaatgaataatccttttaaagggaacataaccccggggaagaaggatctgtaaccaattataaaatgatgtgataagtactatactgtaattacagatttctgtgggagtatatagaaaagagagacaaattctgcctggtatgaaaaaaaggtaatattaacagagtagatattcaaggggtggtgacattggaactaggcatgaggtaggacaataagatctctaggagaatagctgggtagagcagtgcttgcctatagtcccagctactcaggaggctgaggaaggggaatgatttgagatcgaggtcagccagcctggtcaacatagtgagatgctgtctccagaaaaaaagatctctatgagaagaagggataaaatgtgtcttagaagaaaatcagcaacagattaactctattcagaggtggccaagtgagtttctttaaatttatggttgtatattctgtatataaaatgtccatgtatgtgtctgtgtctgtatccatagagatacataatatatgttattgaacccaaacaaagcttgattcatgtggagtatttaaatagcatcaatactatgattagcatcccttcaagtgactgccaatcaattttgaccaatctcattaaacagaaagttgtattgtagttaacattcacaaatgagccatccatttaaggtcactgtttcatcatgagtagttatggggcaagatacgaaaaaggggcctatttaggatctacttttggtcataactgttcagcatttaaaaaatcacttttaatatgattcaatcattgaataaagctttaggtgacttggtacatttttttaaaagtaaataaatatgaggacctcagggatttctgccctgtgtctaattttccaaattcctaattgctacagtcaacatttttttttgtatcctaacattgctatggtaaaattctaacccccaaggtgacgttattctgaggtagaaccttctgggaggtgggtttagggttcatataaaagagacgcaaggtagctaaatgccttgccccttccaccttgtgaaaacacagaaagaaggcataatctatgaaccagaaaactggccttcactaggcatttaatccattggcaccttgattgtagacttcccagcctccagaaatgtgagaaataagtttctgttgttcataagctacccagtcaatggtattttgttatagcaacccaaatggactaagacactaatgaagcaagggaaaaaaacttaagatggctttccaaaatgtgctattctttatttaggagaccaatgcttaggactggcgatcttgagtagttatatcagtagagtaagaaatccagtcacacagtgaactgttggcgactgctatctcaagttccaacatgggtggctgacaaaggagtatgtctttgggtgggagacaaaactaatatggttgccttacctggggcctggactgaggatgagtagagaagagaagggcaaagaagaaaaagacagagctgtggtgagctcacagtctgtgttaggcatagaacacattaatgtcactctgggtgacattttataactaaggcctatgatgaagtgatggctaaatgatttgactataaaacacatcatattttccatcaaggcatccaaaacaaactagtagtctaaatttcaaaagcaaatttgtcgtgcaaagacagcattaattcaattcccgcattttctcttttctaccaaattgtcacctttattaactgcttgtggaatttctgaggtacatcctgcctggacaaggtagatcctgcctggacaaggtagataatagccaaagccacatggtagaaaaatagcagagctcagatgtgggcctgggtttttgtctccaaagatcatcttgtttgtttgttgaatttgggagtttgaccttatcacaagaacactttactgtagtgtgataaccatttatccttttgctcacacagatatttttataagcctgaagatctgtattgactaatgagaatgatgcactgagctcaaaaactagtattacttgcatggcattttaaattatataacatgattgcttataggaaatacatccctttttatagacttatgatgcctgctgtgtcatgcaattaaaaagttccagaaaagcattctcagtatgtcaaattcttgaggctgatttataggattacagctttccccctttgtgattcaattaaagcattttacattgggctattatagagtttaaagtctgatcatagtttggaggctgaactattagattagcatgtgatctgtttataaataaactgaatttcttgttggcaagggataataattacagctgcagtcataaggaatacttactaaaaacctgtaagacagacatagaagataaaaatgggtaataccaatatgcaatggattattggatcttacagatagttaaatataaaaataaaagcctattggtatatgcttcagattttaatccagggactgaattcttgaccagatcagtgatgtgaggaaaaaagtgttctggtaaggacctgggaatagttcaaacaagttatgattacaaattctctgagatctgagcccaatctggtattatctagaaggtcctattaattatgtgtgcatataaaaaccccttaatgggaaatgaatgttttttttccacaaagactggataatagtttcaggcatctcataataagaaaaggaaagagaatcaatggtgctaccatctgagtttggttggtggctatttcaagagaaaatgcattttctttcattttgatgttagttttatttttgatttttgatggcgaggagaattaaactaaattgaatgatgtggactaggcattaaaaatagtacctactcttcataaaagaaagagggcaaaggcagtcaagcatgaagactaaataaatctttaaatgatgcaataaagaaatgataacttagagataatgtgtttgccatggcccttagagatgtcaagtttccacctgtggagataaataagagtccgtttaatagagaaatagaattttgaaggaacagctgcccagactacttacaaaaccaagaaatgagtgatctagtgataacttaaatttgacactcttcagtctttgagaatgctattaggctaaatgcatctccatcaggaaagaatattgcctcattttaggcaggccctcattttctcttgcctaggctacagtaatagccttctaactggtattcagtctcctcgtctaaccacccctccaatctattttttctgtcaccagcgtaatcttccaaaggccccaattttaagccatttctatgcttgaaaacacttcaaaaactctcctttatctaagaataaaatccagatggattatcatggtataaaatgctctcaatcatctggccctccattaccccaccggtctcctcacttaccatgctgtgcctcatcaactatgctcccaccatattgaactattttagatttttttggggggccatgatctttttcacctcaatgccttagtctctgaagctgtttcagtctaaataaccctattgtatctagaatgcccttaggtacttttcaactattatttcttaatgacttttcttgttatttttaattgatcccctacatttttgccagattatattccccaaatcatagaacctatactgcttaactgaacccattggtttacatgaaggtaggtccatttacccatattagaccagaaattccatgaaggtagcattatatcgtacttttcttttgtttgtagtatttatccaagttacacatactccatgctaatttaaacgacttaattaacaaaagttgtaggcaatatttattaacatatttagtttaatttagctaaagttggggagtttagaagtgtttatacaggtttgggtttgggttttccgtctatagttaggcctagctagcaagcttaatactttctcaaaaatgttttaataacaaaaaatttattctattatgttctagtgaatggaggctacagagagctgatacatgtatgtgagggtgttttagatactgtaaaagttctcatttcattgatatggaagatattaaaccaattgagtcacaaatggagataccacacagccatcaaaatgaatagcatatagatagaaaaataaaatgttaaatgagggaaatactataattatagtaccagcatatacatggcatgcttatatatgtatacgtgtttgtgtgtgtgtatctatgtctctctctctatatgtgtatatatatatctatacacatatatatacatgtatctatacacatatatacatatatacatacatatgtgtatagatatatacacacatagagagacatagatacacatatacacatctatgtatacacatatacatctctctatgtatgtgtatatatatgtatatatatgtgtgtgtgtatatatatatagagagagagagagagagactatcctccttatttctggattttatatttactaattcacttggtaacatttatttgtaactcttaaatcaatactcacagttatttgtagaaatgtgcagagcaacatttgagtcccctaacctcactcacatgttttcagcatctgcggtcaaacaaaataattatctgccttattgctttagctctcctcctgtaaagaagtatccttttcacagaatatttagcgtcacatctttcacatttttgagctttttcttggtgatgtcacagtttaaaatgattccaagtgtagtgctaaaatgctgtctagtgtttctaagcacaagcagactgtgatgtgtcttgtatagagaaaatatatatattaataagttccattcagcgtgagttatagtgctattggccatgatttcaatattaataaattacaatatatattacataatgtacctttaaactaaaacacttataaaacaagtttatatattgattgtgaccagaggcttatggaagtctaacttcaaataatgagcattggtgtgtgtgtgtgtctgtgtgtgtgtgtgtgtgtgtgtgtgtgtgtgtgtagcatttatataaatttcagaaaacaatttatagcatcaatgtatacagatctatctagaagtattgtggaacatttggatatacactgattaattatatagttgcctatgataatggggaggggaagaaagaacttcaattttaattataaagtttctctcattttacttgaaaacaaattgtagccaaaaaattatattagtaatagttgatctccatttccaccttcccagttccgggttttgtttttgctttttgacttgggtgaaagcgcttgtcacatgtcttataagtcattcatttcataatatagaatatctttagtccgatagttaagagtatacacattggttctccaccgccgtttagccaaatttcctacagctcttctgctgggtcccatactacaggaacacctactgcatgttactcttgtgacataccttgcatctgcccctccccatgctcatgtgtcctccatgtgtgatgttctgcctatcaaatactatctgtttttcaaagttcagagcaatcacctcctctcccacactccatcttggtattacagcaagttttaattctcataatacattttttcccttgtatcatccacattcttttatgaagtttcttctttctataaaagttgaaaaggtgcctgaaggcagaagaccatggctttcccagtgaaattcctaatttaatagacagtgcttgctggaaacaccaacagaaattaaatatgtgaaaactaaacaacatatacacatgtcataaagtaattccattctcagaaggctaatcatttctataaattctgaaaattacttgtaacaattttgacataatatttgataatataatggcttgtattttatattttgcttttagtttacaaactacataaactacctataagggtaaatatcgttaaaaacccaaatgaagctaaagatttgctccttttgctgcatgtgagataagtttgctttatttaaactgtttttttaagagtctatatttgtctatttgacattcatttatcaccaggttaatgatattaaccatatttttgtatctgccatatcctgatgctctggcatttggggttttaacagacctggagaaagagactacctctcccagggctagcttgttcctgaagttaataacaatttgcccaggagcatagttttgatttgcaaaccaaccaatccagagtctctaccctcaattgcttcttcatctaatttgcacacaccaagccaatatttttcctgccctaaattgtcctagggcaagaaaccagtcaaaaagaggccactcccatagcccggagccctcagaattatgcaaactatccaattctaaaatgttcactctttcctgccttgtctttccctggaagctccaataaaagcttgacctaggcttttccctcattcctcaccaacaggagtgctgtgactccgcatggtcgtgagtgtcataaacttctttcttccaagccttgttctactttccttctgtggctacattcacttttccataccaatccaacatgtacattcttagaacagtttcagtaacaggccctttttcttacatattctttccataaaattcttttcagcattttatttcttccctgaaattcttcattcatcccttattgacaggttgagggcctcatcttattgttgaaaaaggtgtggatactacactaaaaatggcaatattaaccaatcttgctcccttgtattttctgccctatttgcaatggttgcagttaggccatgccttgccagatttctcgctggtaatgtgtgaaatctgccttgcagaccttactttgccatgggtggcttttaagatatagatgagaagaaatattagaaattcttgttcttggcttacacaaaagctgcattctccaatccaacgttaaaaagattgagatgcctcaaacttgggagattatcggaaatctagctagatcattaatgatactgacactatacttttatattcttatcaaaccttagtctgtagtcaatgattagaatccaaacaggacaagagaggaatgtacacctgctgcaacaaccaacatttaatctttcttacattagaaactggttgaagtcttggctacacaaaaaaaaatagccctgagttcaaatttctgctttgacatttactaacgctatgcctctattattcctcaacaatggggatactaactggacctattttaaaggttgtgtggattaaatcagacagttcatttagaattgtgccttgccttaaatacattttagctattatgattattatccccatttattgattcctttaattgcgcaggcaatgttctgagtgctaggaaataaagatttaaactatgccaaatatcttttgtattaaatatagtggaagatatattatgcagaagtcaacacattaattcattaatttctcaaacatacatacacctacatatatatgcacacatgtatcatatcaccctttaacatataaagaaaaataaatttgggatgggaaatagaaaatgaaaggtagggaactagaaggaaatatttaaattgaatcatctaggcatataatacagcaagtgctctaaagctggaatgaatctgaagtatctgaagaacagaaagaagctcatgtagatagaatgtctagagtgaaaaactgaaattagattgaaatggttggcagaaaccaggtcacttaggaagttggaagccttaatacgaggtttatatttatgttaagtacaatgaagaaccattagaaggttataagcaaggaactggtatgacctgatcgagcttttgaaaaaatatgctactgtctgagaatagcccttaggaagacagagtggatgcacgacaaattaggaggttttggcaagttcagatgagtggtgacagaggcttgggctaagaagttaagagtaaagatgaacaaaatgctggatgtactgaaggagaaaaaatacttgcttaagagtataaacttgatgcaaaattttagggagttatctcctccattttctctatcatatatgctattggctccctattgtattctaggctactggagaaatttcaaatattattgggtctgatgggatatatgtgtgtggagtaagaaagccacttagagtgtagctgcaaatgcctacagaagtgtcacttgctttgaactctgaaagctgacagatgtgaactggggtacatgtgatccaaagagtacactatatttggtgtacttggtaagaggtacactgtgttaccaagggacatacgggtatggacaagataattaatttctttctcatcaagtccatgcgactcttctaagacatggatgtgcctgaaaatgcatcttctgtttagaaatcaagcagttctcccttcctacctccccagccatactattaatgagaccacttattccacattataaaacaaaggcatacctctcacttttcctagggacactaaacacagaagcaatttaaaatatccatatcttggaaatatgttttaatcaagctaccagaaacctatagaatattttcctgtacaggtatctgctgaaatccaagtatagcatcataagtggcataattttgcatgctttgctattttctgaatttgcacacagaatgtggtattaagaacaatgacggtttctctttaacaacctcaagtctcctttccacaaaccaagataaaaataaataaatcttttctgggggagaacactgtgaaatcaaaataaataaagcattgttaagacatattaaaggtaacatttcactgtcaaacgcaattctgtacccgtcttcttttctttcttgcttccctgcctttgcctaccctctcgtctgtcttctccctctttctactcctcttcgtgtttcttttcttttttttcttcttcaatccccgatctctgtttctgtaaagttttccaactaatacatttaatgcatttagtaatataaaaacaattaattaaaatatttgttgaaaggaatgtttttaatttaacaattcaaaatttttcaattccttctgactatatcaggttgaaataaagtgcttctcagtaagagtgttattatcaatagtcattttgtaagttttggaaaagcctttttttatatctctccaaaatttagaaaatgagttcttgctatgactatgctttttaaaaatatctttttgcaagcagtggggtttctaattttttgctgttaacaaaattgaagaaggacataattcaattgcttgctgatagataattaagaataatttttgataacatagcagtgttttatctttctgttttggggaatttatactttagaagggctttaaaaaattgattgacatacaattagaacattctgttcattccaagatactcacccatatgaacaatgtttctctgtacaaacaaaaattgtaaaattagttttgagccctgtctcatttttgcactaagcactcttcttccccagatacctaaacacattgagaagaaaatttatctcagtaaagaaatgtatcgagataaatttcaaataaaattatacattatatgttaaataatttctgaagttcttcatatgtgtgtaattgtgttcaattgtttattaattatagttgttataatgactcaatatatagtaggaggaattaatgtatacatatataatcacaataattttttattaataaaatatttttgtagcagagaactgtgggagtataatcagtaaaatcaatcaaggataaaagatatattagcaatcaatccttagaataagtagaatgcaaatataagttcaaggaggataaggggagatgtaaaattgatggttgctaaagggaaatgtttttcatgattttttttttttttttttagatggagtctctctctgtcacccaggctggagtgcagtggtgcaatctcgactcactgcaacctttgcctcccagcttcaagcaatcctcccaccacagctgggattacaagcatgcaccaccaagtagctgggattacaagcatgcaccaccacacctggctaaattttgtatttattattattattattattattattattattattattattattattattattttatttttagtagagacagagttttatcatgttgtccagactggtcttgaactcggacctcaagtgattctcctgcctcagccttccaaagtgttgggattacgggcgtgagccaccttgcccagcccatgattttttgtaagtggccaatcatgcgtatcaagtcactgtagtatttagattccatgggctgcattaaaaaagaattctgtactctgtttctatgaggcagactttttagagtccacacatatgtgaaatcatatggtatttttctgtgcctggcttatttcacttagcaatgtgtccttcagttctagccatgttgttgtgaaggacagaatctccttctttttaaagaagcactgtatggtactctcttttatataaatgccacattttctttatccattcattcattgctggacacttagattgcttccatgtcttgctattgtacataatgctgaaatgaacatgggagtgcagatatctctttaacataccagtttcaatttctttagatgtatacctacaactgggactactggattacactgtaattctatcttcagtttctaaggaacctgcatgctatttttatttttggaattttaaaaaatccatatcatagaaacaaacagtagaaaggtggttatcagaagctgtgggatagggggagggattggtaaaggaaaatgtgttgatcaaagtgtatcaattctcagttacactaaaagaataagttgtagtgatttattcaccgcatggtaaccagagttaataataatgtattacatatttcaaaattgctaatagaatacatttttaatagtctcaccacaaacaaaataataaattgttaaggtgatgtatatttttattagcttgactgaatcttcctacaatgtatacatagatcaaaacatcatatttaacccttaaatatacacaattattatctgtcaattataaagaaataaaaaataacagtaaaagaattatataagttttttttgaaatgacaatatctataattcactaggaattgcatcctttgcaacttttcaagctcatgatgaaaatatttaaatttgtcagggtaaacaagcagaatctttttgatacaaaatatttttaataagtatgtttacatacttatatttataaaattatatataaatatgattgttgatatacataaatatatttatatatatatacataaatgtatatttaaccccataatcactgatctattctgcctccaaaatccaaagaattccatgtaggtactccacccctttcttagtgaaaggaggtgcaaagtacaatatctgttttaaggcatatatccttcactttaaaggatatatcctgttatgttgaagaacactggatttgcagacaacttccttagttagcatgttttccaaagacatatattctagttatctgatacatatatcttactaagaaatctatggtgtctgctacttactactctctagattttcacatgatagttttaatatagtagaataaagtccttcttggcagtgatgaaattagtcaaagtccctgttgtttcagttgagatagaaaaggaagacagttgatacaaccttcagtcatgattttaacagtatcctactgctctgcctaggtgaaaataaactctaaaatttgaagaggaattcatttgccagatcgacaatttcatattatgtgctaaggtctttattaatttgctccattagagtgttcatatatggaacactcatttcaattgaagtcaccacctgaataagttatccataatccttttattctgaagaactgtcaatcatatgcactggaaaaactcagaaagtaaataggaatttattcagaattgccacctctgtatcattcaaagttttgaaagatatctttgcaatttcatcaagggtgaaatatttctttttttttttttttttactgctattgagagaaaatccaacgacttcaacttgccatcattactatcttaacccttaagtaatttcatggagctaggtttctgccagttgctgaggctctttcttgtctctatacacacaagaactggagaagtgatcaccaaggttggttggagtccctctgagcctatcattaggtaagtgcaagtgagaacttcatttatcaccaagtccctcttgaactcccattctgactgatacatttccacttctaagattcaaatggtacaaaactttgtgttaattattattttttcagtggcattaccaagccaatagccacaggggtctgaaaggctataagttttgctttaacttaggtctagaaattagggagaagagcctgactctgtatcccagcgaccaagtcagtcacttgttctctgaacatccttagcacagccagtaaggggagtactctctgaaataaacacagttgatttttttctctcctttatcatctttaaaatgccctcattataagtccaatttttaatcttctaaaaaaatccctctatgatgaagagttttatttttaacataaatatgtctcaattattatctcagaattgcatctcacttacatttgatgctgtcttgcatccacatgctcatactacctttattctaaacatggtcctctgtagccaggtaattggtttctggtctttagtgataagtaattatgagaagttttcttcagcaaagatccctggggctgataataattgtctagctgacataattaaatcatttctgacaattcaacaagtcttattcttgtttaggtgaaaggtgtttgggattaatattcttacttttgacatcttcaaaataggagaaaaaaaatcaaccaacaggagttcacatatatgaagtgtgatctaattccttagcaattaggcaagatttagaaattatttttgtatttctatctaatttaagatggctagcagttaaacaatacatttattaatcctcttcaacaatattgcattccaattacagaataaatctacaaataaggtgaacccatgactgtgctaccaaatcccgatggatcccatcaacaaactgaaaatggtaccgaatttcttgaagatgagatgaaaatacaaccaaagaccatgactgaacactttaaatcctactcagattaaggaatagactattgaaaaagagtgggttgttttgcagaggaatctaagcataattcatgatgtaaggaaatggagcaaaggagaagccagctatggtgtagtcagtagagaaattaactaaagagatagaaacagttgcagaagttccccattctcagaataaaccctccttctctcactgtttacccccaggataaaatcacaagttcagccagtcaattaataaaataaactgaaacagtattccaagacacctaagataccaaaaaggatgcaggtccatgcacagagaaggcaatctacctgcagttgtacaaacgcaactgacagcctgcatgtttatcgcaccttgaggtttgacagtttagtacttttgtggatgctgtgagctgtcttttgtgtgtgtgtatgtgcttatgtgtcagtgttattttttgttgcttgaaattttgagaacagatgctcagggatatgtatgtatgtggaattggttattgggttgacatgagacaggagtgataagacaacttctcctgtcaatccagattcccacatggaaaattagcagcagaaacaataggaaaatgatttaactgattgcatagttagctggatccatgtgcataattagctggatccatgtgaggaatatacagaaatggtttctgtgaaatgctaaattttaatttgattttacaggacaagtctgctatgttgcctgtatactttaaggcattcatcagcaaagactgagagtctaccaattggaaggaggctatctggaaggactgataaagctaagcaagccaataaatggcccagcaatcctactgctgagtatatacctcaaagaaaggaaatcagtatatggaaaagttatgtgcactcctatgtttgttgcagcattgttcacaatagctaagatttggaagcaacctaggtgttcatcagcagatgaatggataaagaaaatatggtacatatacacaatggagtactagtccaccatgaaaaagaatgagatccagtcatttgcaacttggatagaacaggagatcattatgttgaataaaacaagcctggtacataaagacaaacagcacatattctcacttatttgtgggatctaaaaatcaaatcaattgaactcatagagagtagaggatgattatgagaggttgggaagggtagtgtggggttggtggggaggtgggaatggttaatgggtacaaaaaaataaaaagaatgaataagaccgactatttgagagcacaacaaggtgactatagtcaataataacaaaattgtatattttaaaataaagaaggtaatttgattgtttgtaactcaaaggacaaatgcttgagtggctggatactgcattctccatgatgtgcctatttcacattgcatgcctgtatcacaacatttcgtgtaccccaaaatacatacacctactatgtacccacaaaaatgtttaaaaataaaaacataattaaaacaagcaaacaacaacaacaacaaaaaccaaccacattgaaacactacccacccctagtagaagagacaagacaattgtttccatatgctattcctcatcgtttctcaataggtaattgtaattggaacacaatatggcctgaatggtgttgtaaaaagacattagtgcaggagaagaaattgcatttagaattaaccagtggaatttggcaattcattctatcaacaatttgggttaaatatgtgggaactgattttctgggtacaagtcaaacaaggagaaaggaaagtaatgggggttgggctaaattgccgcatgcttgtcagtaatcaagacactttttgaatttgctaacacaatcagaaccaatgaccctgttaggagacattaaattaccagaaagcctttgagtgatacaaggtaagggattcaacaactacagataatcgcagtgctagattccatgtcagaatactcagcatctcaccatggcctatgagccattccacacccttctttctctttagatgggtaaaacaattgaccaaaatcttttaagtagagccctcctggttgtcctctgtaagctctttcttcattcatagacatttcataagcaatgtctatgaaaggcttgtgatttctgatctcagtttgggtggaatgagtctgcgattttgtccccaagtggggcagttagatgtaattaacaaggtgaacgtagtcactgtaaaaaatagcaatatggacatgataggcagtgttgagggaatggtttagtatcaacagttttctcttcttaaccagtcagtcactctgcaaaaagaaagtcaacaaatcacaagaaagcactattattactggctatgatgacaatgtttttttgtatgtgtgggggggcacaaagcatgaaagacagtgaaaactagagactgagaataaacaattcaagaagtttcagtgtgaatgaggaggaagaattaggataatgactgcaggaagacatgttgaccaggaagggttttaaattttcatgtgaaagaggataaattatctgaaaacactaaagatctcttggtttgccttgatgaacagagacccacaaattttggaaagaattataaaacatctaaatgataaactcttggtaaagtgaatggtatctccatcaactggcataagtttccccaaaacaggtctaactctcttcaggtcttttggaaagttctaccagatcaaagttgtagtgtccaattgatggcagtggctgctgccatcacgatggccacagcccagaggtgcggctggggctgcacactacatggagcgggtgggagccccgccccttctgaattggggcaggagctccatgggtgccgctgcagcccccaaaactgtggctgcagatcctgctctacagagcaagcaggagccatgctctcctgggtggggctacagctgcccaaactgcagctatggatcccagcctccctgtgctcttgacggggcctggagcaggcaggatctgcccttctgggtgtagctgcagctgccactgccccatccacagctacagacctgggcctcccactccaccaagcaggcaagagccagggacatgcaggagccccaccccttctgagttggtggggcgggagctcccccagatccagctgcagccattctcccaggcacaggacctgggcatctctgcagcctgcacccttgggggcccaggaaggccccccaattcccagctggctcaggggtgtctgctctcactgcctctctcctcttctggccctggctcagattttggagcggggggagccccagggccttgaatggcagttggaagcagaatcctgggctcacaggggtggtccagggaaggcctgaaggctggaggtaatgctgccagtcccatggactggagtggggactcgccatgcctcttctgggggcccatggccacccatggaccaatctgcatgcccttcctccctgctgaggtccatgaaagccccaggctcagccagagcagggcagagggcagaggatgaacagaggactggaggacatgctgcagagaggagctaccctctctgctgagagcttcagggacctgcagagataatttgaacaacctgcctgtggagaggagccctgtctccagggccacctctctgctgagagctgaacattccacaagaggacctgcctacagagaggcaggtgggaacattccacaagaggacctgcctacagagaggcaggtgggaacattccacaagaggacctgcctatagagaggcaggtgggaacattcctcaagaggacctgcctacagagaggcagctgggaacattccacaagaggacgttccacaagagaggcaggaaacccactgtgggtttcctctgagctgttgtaacactcaataaaacttctcttcatcttgtttaccttccacttgtctgtatccctcattctttctggatgtaagacaagaacttgggcaaaagtgccactggccagagagttttctggccagaaaagcaacaccctaaagatcctgtaacacaatgtcactggcatagttaaaaacatactagggaaatcatacttactgaacaccaactacgcaccaagtccatgttaggcactgtcatattactaaagaatgtattttgcattgccaatgaccttgcattagatgccctctagagtttcttcaacatttaatattttgtgattttcctagttacaagtaggctggtatgtctgtcacaaaactgtattttaaaactgtgctaaaatgaaattagccacagccattaactaattaatcattattgtcagaacataggttcacccaagaacactgcactgcctacacatttatctagagtatgcatttctttttaataaaataaagtttaagcaatagttcaaagcttcaagttgaggaaaaacaaatgtgtgattaagctactacattggttcttagttcctcactggttccctatgatccttctattttatttccctcattggttccctatgattcttctatttgatttttaatacaactcacgtttaaattgctgtattttaaacctcaaaagcatgactctttgcatttttaaaattcctattcaaggttacagttgtaaaactatttgcctctaattgatgtccatacaatgacatgggggccagagaggagctgaaagggttagaaagaagacaactaatatgactttgctaagttattaatatatgatcattcttcataaagtcttactacttttttctaagaattacattagaaggcaatatccccatattctcaattaatggtctgtttgccataacaatgaagcaatgaaacttcaactgtaagttgatgtcaaccactggaatgggtcctctcctctatcagctgccgatctctggtgaggaactcatgtgaggagcatggaagggaatgttaagagagagcaacagccagagcattggttttctttgctgtcatacacggcaatgaaaaaatacttttagatgaaattcatgttatctctcaagcattaagaagtttgcatgggttgtaattacatcagtgaagttatattttcttaatacttccagttaatctaattactctctctctctctctctctgtgtgtgtgtgtgtgtgtgtgtgtgcattgaatggtttaaatttgaaaaggtgatcatagtaataaatatttaataatacatgaaaatgtgcagctacagtgatttacaagaatattttttaagttgactgtgattgataagttatttttacaaaatggttgagttgcagtaatgggaaatattaagcaatggaacactaaatattgttaagacaaatcatattttaaaatagagaactatacctacatcagtgccaagttctaggcttgtggctttatatttatgctctctactataaacctcacaacaaccttgggaagttagtaatggcattattttttataagatgaattttctgagactctgattattttaacattgtttttcaatattatttgcctagtaaagtggaccctgatttgaatcttgcactgatcagctccaaagttctaagttttctaattttcaaggctgttgatacttgtactttgccaggactgggaggaatatatacacagtgttttaagaaggaaatctaccattccactaggtcttattcattgctgatgtcaatgctttttttttaaattccttttagtaatttataagataacaaaggcatgaatctgtttatcaaaattatttacctgagatacgtaaactaaatgatgtgtaagtatagactgcttattcctgagtggcataactgacctcagttcttaacttcattaggttgtaccggcttgttcttagtaattttgagaactgctcactcctatgatctgtttctgatattataatagtataataatcaacatttatggtttctttactatgccaggcattgttttaagttctttgtgggtattaatttatttaatctttatactaactctatagcttgaggtgaatgaagttcatctataaaacaccatgtgcagaatcttaattttgctctattctctgacttcttcaaccttggtgtatggagcagtgcttaagtactaattgtactattgtgaataattggagtgggataccatttattattttactttagatacatcaagtatgcattagtttggatgaagaacacatagaatataaaggacatagacacgtatttactcaccactagtgatagtcatcatttttgttattagtttataatccctctttttataagaaacagtgttaacatagagccaaacctcatttccctaatcaagttttcagtttttcttccctagagatagctgctactctgatattggcatacatcattcatatatatttttatgcttttattacaaatgtttgtgcataaatagtacatactttcttgtgtactttaaaacattatataaatgatatcatgctattacaatcattttttcaatttgcatttttactagaattgtatttcttaattttcccatgcttttacaagagtcaacatttttttattgctgaagtgttctattataaatcaatcatggtatatttatccattcccttactgaaaaagttgtatcttcaacagcatcttgctttcaaacagcgctgcaataaatatccttggacacatgcttaaaaatgtctttagggaaagcagaaagaaatagaattgcttggtcctaggatatgcatatattatttttgtcaggactgcttgattcttctccaaagtggtactagcaagttatattcccattggaaatgtataacaggcccaatttccaattcttattgttaacccttgttaaaatatatattaatttttaacaatcttatggttacgatctggtaaaatgttatcttagttgtacatacatgattaagaaatgggttaggcatttttccgtttcttttttggaaattccacgttttctaggtgaactgcctatttacatatattaccagtttctttctactgaatcatttctgtttgttttcctttttgtattttgtttacaaatcgtttgttcgttgcatgttttgttatcatctttcttcattgcatttatggtattctttgacatattatttgtcagaaataataaatttaaatgcaatcatttgtgaaaccttaatgaaaggtttttttatattttttgtcatccatcgaaaccctatcaattatcaagcactcattcccatatctgtgaagcctatttctaagttcatgtgtgtctttttttctcattgagctttttatttatatcctgagaccatatttttaaaattaatttagctttttaaaattatcagtgcctaataatcaaagtcctcttcattcttcttcaaaaaactattgctgatttttggctttttacaattctaaacatattttaggaattgtgtaagtattactaaaacatatctattaggatggttatctaaactgctttatattcacaagtaattttttttttttttttttttgagacagggtctccctccgattgcctggctagagtgcagtggtgaaatctcggctcacagcagcctcaacctccggagctcaggtgatactcccatctcagcctcccgagtagctgggactacaggcccgtgacatcatgcctgggtaattttttgtatttattttgtagagatggggtattgccatgttgcccacactggtcttgaactgaagcaatccacccgccctggcctcacaaagttctgggattacaggcgaaagccactgtgcccagcccacagataaatttaaagttaaaaaaaaaaaaagttatggccaggcgcggtagctcacgcctgtaatcccaacactttgggatgctgaggcatgcagatcacgaggtcaggagttcgagaccagcctggacaatatggtgaaaccccatctctactaaaaaatacaaaaataagccaggtgtggtggcgcgcgcctgtattcccagctactcagaggctgaggcaggagaatcgcttgaaccagggaggcggaggttgcaataagctgacatcatgccactacactccagactgacaacagaatgagacaaaaaaaaaaaaaaaaaacaaccttatgatactgaattttcctatccattaacaacatatttctatttactatttctgtatgaggaagtttcatcaaaacatttgaaatataaatacacaattgagtaagttgacaacatacctaaaaggtagtcatggctatataaaataaatttaaaatataaaagcaaataatttagaaaacttactgattcattttctttttttttttttgagactgagtctggctctgtcgcccaggctggagtgcagtggtgcaatctccgctcactgcaagctccgcctcctgggttcacgccattctcctgcctcagcctcccaagtagctgggactataggcgcctgcaaccacgcctagctaattttttgtgtatttagtagagacggggtttcaccgtggtctcgatctcctgacctcatgatccgcccgcctcggcctcccaaagtgctgggattacaggtatgagccaccgcacctggcccggattcattttcaaaaccaggaaaaatttgtaaacttccaatgtgtccacaaaggcttttaaggtatatactgattgttggaaacattcatttttcacaaatttgatttcagacaactcaattcatgcaggagacaaaattttaaaattcaataaaagtatatcaaataaggacagtaattatgccgagataaaatgaagtcaagacaaaacctccaaaataatcaaatgtaagaaagtactagaaattactagaagggacatgaaatatttcaatcctttctggaaaacaaagccttgaaatactcacttctgaccactccatcattctagtcaattggtcatattgactaattgttttccaccattctacctggtcccttttcttgttcattttccaaactgtaaatctctttgaacttccatctccctttgtttcacagttcccacattgctgtaggcttctttcttctcacctgaatattattgttcctttccctttcaaatatttccactgcacccctttggaggtcccattccatgtaaaaataatcccatacatattcagcttctctgttgaaagcacccatcattcaaaactgcctcctacctgaagacactagtttctctgcaatgcactttttttgcctaccacctccaatcattccaacactttgtctgatgttttcactctaccttttccggcattcactgagaatgtcagtacattggctcttctattttctctcaatctattagggtccttttgtattcttttttttctctagccagataaagattagaaatccattattttactctcttgccagtattctcagattttaaacctactgtctttccctcagaggcatctcgaaaaatgtgtaactcattatcaatttttcacttagtatcaacctgccacttcttctcttacactcacatgtcctccaaaactcctgctgaaatttatttgccattgtaacagtgttgggaagtggaatctttaagaagtgattagatcgtgagggttctgcccttatgaatggattaatgctgttatcacaaaagtgggttattatgaaagtgagtttgcccctactcttctctcatgtacgcaggttttctcactctcactttctggcatggaataacctttgacaaatttttgtaccatgctcttagacttcccagaatccagaactgtgagaagtaattttcctttctttgggtgttaaccagtctgtggtattctattagcagaaaatgaactaagacaaacagctatttcaaactttttccagtctcctcaaaactccaatgagatccctccactttcagaagatgactttgtcacccactttactgaggaaacatagcctcctataagaactcctccaacttcctatgacatctcaaactcaccatcatttttactgtttcgtttttcttcccttctattacaatagaagaaatagattcatttctttaacacagtgattctcaagccttatatgcatcagaatgactaaagccattggtaaaacatagactgatggaccccacacctagaaattctgaattagtaggtctggggtggggactaaggacatagttctaacagttccaggtaatgctgaagctctcctccagggaccactattctaaaataatttctcactagtatcaacttccttgctgtacccctagggataatatttcttcaataacctaatcttccaattattcccaaactttccttctttactgaattcttcccattagcaatcacatatcctcaagtcatttacagggaaaggaaaaaagtccttccacgtatatttatttcaattaccttctcaccttctcctcccctacacaattaagctgactgaattagggtttttgttttgttttgttttatatatacaagtatcttttattggagtattttcatgtatttgtcatgctaccaaaatcaagttatgactctacacataaactctttgataaaagttaaataaaatagctatttattagaaaatccaatggacactttttagtcctcttaattactacaaagattgtgacttacctactccttccttcttaaaagacattttcaacttggctttaatgtttctaatttttcttcagtctctttcatcactttgattaatgttttttggaattatctgttgttgatttactttctacttcacaaatagtctatcattttaaattattatttaaatgttgatgtttcaaaaaccacactagatgtatctccttccttttatcacaccagtgggataaatctagttacctttacttaagaggggagggtataaagaagaattagactcttacaggtggcgggaaactactcctagtgaaacacaaggaaaaaacaataaaagcaaaaggttataaaaagacaggtgggtgaatctgagatattctcattttatcaaaataaaatgtgaatcaaagcagtagaaggtatcaaacagtcattgaatatacaggagaataagtttattataatttttgaaacattttcaggtgaattttagagtctgagaaagtaaaccttaaattattaattatactggtatgtctcattttataattttttatcgtcatgtctgggttcataaatgcaggtgggaaagctgataactacgttttatttgaggcaaggatttgaaaacagtttcaaggaaataagggagtaacaggtaattgaagctattaacagtggggtgattataatgttgagtcacagatattaagctgggcaaggggaagaatatataagaaagagctaaagaataaagagaatagcaaggtaataaacttgatgactgtataaggttgaataattgttacattgtaatgcatgagcaaactcagtcagaggacagacggttatgattaaggactagatgttttatttcaggacttcaaagaagtttctggtgatgacaaagtctatggaataaccttggaagttagtgaggtagaagggcatcagggagccagatgccaggtgctggattcccatcaaagacacttagaatgattacagaagttggagaggacatgacttctgtgagctaaatgataacgtcttcaatgaaggaagagggaagggctggtaagtaggtctataaatgactgctattttgaagggagtgagctatagcaagatgagctcaaaagaacaaggcatttcactgaggtaagagtccttcattgtctgaaaggagcaataagaaacttagagaactctgattttatttttctgtcctaagtcctagaaatatggaatattagaattcaaatatgagaaaaaatcaaagttcacttcatggaaggaaaatgacatccacacttcaaggacatggaggacacctttgaaaaagaggatgaggacacaagggagctaataatgattactgggtgacaagaaaatggtcccagcagaagagtttgggagggaagagaccatttcataaataaagaggatataaggagtaatatgggcatgagaatttgggaaaatttagaatacaataaatatcgagaggcttatacttttggcaataattctggtaggaagggacataagatttggtggacgtaatattgatggcttttaatgggaggacagcagtagatctcaggtttcagtgattttctgtctgtaggactgggcttttggccccatatggctgttgcttcaggcttaacgcaggatgtgcataaaagcttccttccttgccacccttgttctcaactctattaaattctctgttatcttttcaccttctttccactgaaatagcagaatatattataacaataaaggttgaatggtttctgtatcattctagaattcttctagctggtatttattgtaagctcttcttttagcaagacagttgtgatttattttataaaggaccacttccttaatttccctttgtgactaagacaacccccaagacaataacctgcaataagctatagtactttcaaactcaggttgccagtgtatgcattcaaacataaaaagttgagtgattttttttcgagttcaaaaattcttgaaatttaatgtgacacaatattcaatttaagatattatccagcctataaagctatcatatttgataggtctatatttttatacagccattaaaataattatactaaggccaaagtatgaaaaacttgattaactatacagaagctgcataaatttgaaatctgcacatgatttagtgtggcttgcagaatgatcaaagaatcaagctctacaaatacaaagcttgaaatagcaaagagggttgaaatgatgcatttttattaaagccaaccagtcaaaggagtttgttctctaggatataattcacttgtgcttttgttgtgcttctcaatagaattctcttttttttccccctccaatttctcattttgctctcaattttcctgattctttctcctctcaactctatctttcagcttgagtccaggactgttttagaaatgtttcaattgtaacttctggtaaaatttatcagttgaagttagactcagcaaaagctaaattctagttgcagttttaaatcagatagatctgagtttagatgccagctttgacattgacaagctatgtgatataagcaaattatttgaactctcagaacctcaaatattgagcttccttattggtaaatgggatgatgatacctattgcaaaatgtgattgaaggattcaaatgaaacgttgcatgtaaaatgcttccattatgcaagagtgtgctcaagggatatttatttcctgatcacttacaacttcctttcccttatggaaaacatcactcagccgcgtaagcaagaattacattgtttagctctcttctattcaaaaaacggtaaacaagaaatttaagggaaatgattactcctttaaaatgcagatttatcttcatttttactcgaaaacatacaaatctgcaaagtctctcgaaagggcaaaatttagtagaatgctaaattataaaatttgcccataaaatccatttgataaaaaagaggcattcattagaaaagagggtataaaagaaagtgagaaattaatgcttgtgcaaacataactgagacggctgttgatcatcactgcagacaaagaggtgtggagatggcaggctctttttggatctatcatagtgcagataatctggaaaagtggtggggacaagatactgggaagagctgtcctcacaggttgttgaatcattgactaactgatggactaaatgactatgaagtccctaaaatgttccagacactgactagacacattgccacattaccatatcatgcctcaggttatccccaccaaaactcaatgagtcctctaacatcccgattcctttaaatcccccctgtccccaccaaaagaagcaaaactgaagctcagaaagagttcatatgttgtctatatcacaaatttaaatataggtagaactgagatttgactaggtcctctgacatcttctctaaatgacttcatcctttaccaacacagcaaggcaaggaggatgagttcagaaatgagaagctgctcgtttaaaataggtttcctttgcatagattagaaagaaaaattcaaaacttcagttaaaaagtgaataatttaagttaaactggaataattaaaaagtaaaaattagagctaaagcaccagtttgagtcttccatggtaaaatagttttctcttgctcaatggcattttctcctccaggtttatggaaatatgatttaatataatttaatctgtatttatagaattgctttaatcaagcctttttttgaagccatattctgttagaaaggatcatgttttgttgaaatggattctttatactgtactcattgatccatgcttgagagaatacttctataatgatctaaaagatgtccatagaatctccaattgccagatttcttctagatgaaaaacaaacaaccaaaacaaaacatgttctatgattgaataaatttttaaatcattgcttatcagtatacttaactgtagagtcacagggtcatatagcaataactgtataatactgcagtaaagtaacaagtttgtgtttaagtaaatattattcaaatatacttggtagaatacctcaccactttccttttttaactgtagtaataataacattgcagctattgttccacagaaaacaacttcagaaatgctagttagaaaactaatcatatgatattcatttttctgatattcataattatctttaagcaaaaggagcacatggcaactctaaatgttttagtacctatcatactatttaaacagaaaagaaaggtttgaaagagaggtagattgcaaatttatgtgtgattcaagtgccttgatctgatagtcagcataaatgtgaggcccagaagtaccaggaaacatttatcacggtaactaaattgctctggggagaaataaaggacactgcctttgcaaattcagctgtgtcatcataacatccctcctccttcccaatttctcatcccctaagaatcaaacacttttatattcactcatttggcaagcattcactgagtttctattatttgagaggcattatgctaacctctggagacaccaacacaacaacacttatttcttacctttgtaaaacctataatctagtggaagagacacaagcttgccaaatcttttactgtgatgagataaatattatacaagaggcatcaaaagtccctaaagactaataagaggcacctaattcaccctgaagccagcacaatttttccagtggtgcttgttaagtggcaaaagacaagtgacatttaacacataaatgagaaaaaatagaggcttctaggcatagaaaatggcatgagacatggcatggagacatgaaaaaccacagagcacttagcataaagctttagtgacttactaggatacaaaagtgtgtctgtgtgcatgtggtctgtgtggctgctgggtagggagggattgagcaatgtggctacagagttgggcatggatcagatttataaaaggtgttcttaattgtattaagaagctgggacttcttactaaagacttcagggaaacacaacaagttttaagcagtggagatcatgtagcagaaatatagatacgagtgtagtgaaaataaagactggcagcagagagacagaaaagaccattatagacatcctgggaagaaaagatgaagaacccaaccacagtagtgacagtaaagatatacaaaaagaagaagcatggtagtaaagcagattgccaaagatattagtgtcttcccatgggccgtttgctaagaatacatcatacattcctcctactatacttgaattttaatggaggatatttggttacaagtccttaatgaaagtaatgattaaaattttaaacttacagctagccacagtgatatctttagatataaaaaatcttaattgctgtctcaattgcatcccatagacaatcacttattctacttttttgagagctgactcaaattgtgtgtgtgtgtgtgtgtgtgtgtttaaatgaaagataatcaattgaaaattgagtaaattatgtttcatgtttagattgatggatgttaattttgttttaaaactgctgtagttctttttattcttgaaaggcagaatctttgacaataatgacatcaatgctagcaagataacatttacaggctctcattatgtgccagtcactgttacaaatcatacttgtgtattttggtagatgctaccaaatattaaataactttggtgaagctgggggtaatctaggtctactcattaagacaatacttagatcaagcttcttgaggggaaaaacatctctgacactctacattttctcatgcattgatagattcaacatagatctaacctatattttattttgtcttgggacatttttgtatttactgtgaaacagagtctgatccttcacctcttcatatttgatatctatgattaatatgtttttatgatacatttgatatattcatattgattatcagtaaaagcctgtgaagatctaaataaaatcctttgtgtaaggatgttagtggcccctagactcttcagaggattttcagaaagctactggattgaggttgtatactacaacaaaccgaacttgtaaggagatacaaaccaaaaaagatgtccaaggacaaattccttcagtgtgtgaggatggatttcatttacagtctcattctcctacttctaataatgtcatcactgcttttatgggctgtgattgttatgctaacataaaggcaaattgattgtggaaacatttgtaatatagggaaaagtcctaaccttctatcttttgtgatgcttaatattaggaatcaaattgaccggtaaagcattagttttgggtgtatctgtgagagtgtttccagaggagactggcctacggttctgagctaagtgggggagatctgccctcagtgtgagcaggcaccatccaattggctgtaggccccaagagaacaaaaacagaggaaaggcaaattggtttagctttcccctggagctaggatacacttctttctcctgtccttcaatatcagaactccaaactcttaggtctttggacctcaggacttacaccagtcaactctccacctcaccctctactatgacttcaggtcttcagacttgaacggagccatgctactggcattttagggtctccagcttgtagaagggctgttgcgagacttctcagctccataataatgtgagccaattcccctaataaatccctgcttacctatctgtcagtatgctattggttcagtgtctctggagaaccctggctaatacacttttgttcaaatctactttgttaagctgatcttgaaactattgattctttttttttttcttttttgagacactcaaaaaggcactctattgcccaggctagagtgcagtggtgcactctcagctcactgcaacctctgcttcccaggctcaagctattatctagcctcagcctcccaagtagctggaactacaagcaagagtctttaatgaccagctgatttttgtattttttgtagagacggattttcaccatgttttgagataaggagtcccttatctcgaactcctgagctcaagcaatcttcccacctgggcctcccaaagtgctgggattacaggggtgagccattacacacagcctgattatttctatttaaagtatttatgccaagaccagagacctcaagtattaaaagagatacgagtctccattataataccaaatatgcaattgagattagccctctctttgtctttgccaattacactgatacataaatggaacacggatgataattttaagaggaaattctggaaacaatgatctggagtaggactgtttagaggagtttgcttatcatcattaatttttaatgagaatgcaggacatctcctcataccaggatattttacagatggaaggaagcactgtctctgctctacaagagcttataatctattatttagaaatgtttctgaaatttttgtgaagataaagccacagggaagtgggaaagatactaaaaactccatgtacacaatcacagaagcattactactattccttttttctaagcatatccatctgatgtttttccactgatcatatttctaaccctggtaaaaagaaaaatgagtaagtcaaaccatgactcaaactttgactagtcattatcaaagacatatatatgcaattctgaaaggaaatgtaataatgattttctatgcataaggacaaatacttccattcattttgctcatatttcttattctacaaatgaattttaaatgtagaaacatcataatcctattaaaacacagcttcttaaaataatttggctatagtgatgtggtgtatgcagaaatcagctgaggagtttgctaataacacagatttctggcttcatcccagatattttaccacgtctgtgctgaatctgagaatatacattattaacaagcttatcacatgattctcacacaggtgttacttgatacacagtttgaaaaacatgatataatgagaggaaatatttaatatttacttttcctgagtgtgcctttcagctcaggaagacagatgttagtaagagttttgaagttgggtggcaacagggaatttgttcacctgaaggcttctgtgattataacactcaaagagataagggacaagaagaaatcaagatcagcgggacttgaccagaattacgttgaaagggagacataaagacaacataatgaataaaataaaagccaatatccaagcatgttgatggtttaagagttataaagtagttgagtctgcgagatttaataaatcaaataacatttactggtcatatggaaaaaacaatgttttctttcttcattttttattttttacttttttttaattttttgtttgtttgtttgtttgtttttgttttttgagacggagtctcgctctttcgcccaggccggagtgcagtggcgcgatctcggctcactacaagctccgcctcccgggttcacaccattctcctgtctcagcctcctgagcacctgggactacaggcgcccgccaccacgcccggctaattttttgtatttttagtagagacggggtttcactgtgttagccaggatggtctcgatctcctgacctcgtgatccgcctgcctcggcctcccaaagtgctgggattacaggcgtgagccaccgcgcctggcttctttatttttttatacactcagagtggaaacagtttctcaaatgtcttctaaaggatatacaatcaccacaagagaaaagtctgatgcagctgttttttttatagcagtggccctgcagcctagtcccaagtggtgcccagtcccaagtgataaaatggtgagagtgaggggtggcactctctttgaatggtcaaagaacattaaagaatttacatgaaagaaaatgctgaacaaatgccactaaagattgaacagttaggtacttagtactttcatgatattttaatagtttatatggtattgaatacttttgtatgggaaatattccaatacagttctaataataaacaaatttctacctatgtgcttgccactgaaaataataagcaagaaaagatacattttcatctatagttaacattaaacagttttaactgggctttgatgaatagacagcaagtattttgctgagtatattgctatctcattttgcctaggttgaacttttaaaatatactttcaaacgttttgtaacatttattgatttattttcctgaactaggtaagcaactgcaagttatattggaaagcatgcatttctggatatttttaatttatacaatatatttctaatgtacagacatggtagtgtcatatttgagtaccaagagcttcctctatgtatcatgtgagttcttattccagcctattcatgctttttatatgaaatatatacaattattctcttcatatctattatttattttatttactttaaacatatatacaatattcttattatataccaagcaattttcttagggctttacaaatgctaacacatttatttcttgcaacatccttacaaggtaggcgattttattagatgatttatagatgaggaaaattatgcacaatgaggttaccccattcatctaagatcacagctgtgcctctagaggtcagccgcacgtactttgattccagaacctatgctttcaaccatgatactatcctagctctctacctttgacaatgatataggtctcagtagcagcaaaagttcattggagatgtgaatgatgaacagataatagtgtactagacgtaaccctgctcaacaatgtatctgttagtcttcctggagggaaatcttacttcctgccaggtaggcatggtcatatgaattgctccaatcaatgaacatgaatagaagtggactatgtcacttatgagcacaaatatttaagagctttattcaactacactctccttttactttctatgaagaaataggaagtatgggataaagtgccataaaatcaaagtatctcagaatactgaaccaccacatagaagacaatttctctggaaagctgcccaatgtaatttatgtgaaccaggaataactgcttggggtgttaaaccactgagattgtgaaattatttctttttgtggcacaatatataccagtggttctcaagtaaggatggttttgttctcagaggatatttggtactgtctagagacagttttgatcatcacaattcggaagggggttcctactgatatataatgaataaagccaggggatgttgccaagcatcctacaatgaacagttcagactccacaacaaataattatccggtccaaaatgttaacaatgctgagttttacaaaccctgattttgtctatcctaatacagatattgcttcagagtaagcataagagtgtatgaagcagtttggcagggcgcagtggctgatgcctctaataacccagcactttggaaggccaaggcggacagatcacttgaggtcaggagtttgacagcagcctggccaacgtggtaaaacctcatctctactgaaaatacaaaaattagccggatgtggtggtgcatgcctctaattccagctactcgggaggctgagacagaagaatcgcttgaacctgggaggcagaggttgtagtgagatgagatcatgctactgcactccagcctaggcaatagagcgagactctgtcaaaaaaaaaaaaaaaaaaaaaaaaaaacagaagtgtatgaagcagttataataaagatcacctgcattgattaaatctagaggtcccacataaataaattgcacttaaagctacccattccatatttgctctgcaagtggcaaccaagtgcaacttaataatttcacataaaaaaccttactttataaataaaatattcttcatctccactcaaaaaattcccttcctacatggcttccactaaaaaaaaaaaaaaaaaaaaaaaaagctctgagtttgcttttaaaaacaatccggctcctataagacttatgagaccttgcgtgcatgcaaatcaccaagcatcaacataaatacactaggttaagtaaacttgatggccatgggggatacatttttttcctcctgtgattgactttcgtcagttataattaggcatgtaaattctctgtgcttggaaaaaagattttgaaaaaggaaacttatccagtgctctctggcatctgggatttgttcttgtttccactgcttctaaagaggttgcataatgcctgatttgtggagaccaatattttattcgaaaaacagaaaggatccagtcactgttttggggactaacccaaaggaaattgtttagtatattaaattatactcagaaaactgctgtacaactgtttttataacttggaagcgttaaaaatccaggatttttatttcaagaatcgggtttggcaaactttttctattaagggccaggtagtaaatattttagattttgtggtctaaaaagtatctgatggagctactcaactctgctgctgtagtgcaaagggagctatagaaaactggtaaattaatggctgtgaatgtgctttaagaaaactttatttaaaaaataggtggtagactagatttggcctccaggtattattttgctgactcccattctagataatattttcatctggaagatgaaagatgactatcagtttaaattatttggccactgccaagtcatagtaaaatatggagtgaaagtaaagaaaaaaatattcatgtaatgcctattatgtgtcaaaaactgtgccagggaagctactcaccttacaatgcacaggacaaccactcataaagaattatctagcccaaaatgtcaatagtgctgaggataacagactctctcgcctttgtagcaaaatgtagttaaaaaaatccaccaccatcagcatcaattggaagcatgttagaaatggagaatctcaagttcctcccaagagctactgaatcataatctctattctaaaaatattcccagagggtgtgtgtgcaaatttaaattaattcacggtggtccagcctggcataactaatataggggtcgtgaatatggtgacattatcagagaaatgtgcatcagaatggttaaaaatttgcactactttacaactcgtaaaggcttgagaaataacttgaagacatctttctgacttccaagagtacattctatctgctatcccattttatctccctggccaaaatcttagaaaaatactttaaatccacctgaggatttatgcataattttacatgtataaattttaacatatactagtaaacatctaataaacataatacacagagcatgctctcatgaggaaaataaccctgattcttcaggaaccatttgttattatttgtataatgactgtttaagtgctatccattaacaagaagtagtgaaatcaaagtcaaagccagatgggttcaagttaaaatcttaatatgatggcactgatcaatttatttatcttctctgagttggagctagctaccatgccgtattattgtaaagtccttattagataacaatgattagctatcactttctgaaagtcttcatatgaactgaattgccttttcccagagtaaaataatttcttgaaagtctcactcagggtatggtggcaacttctcccagaaggatttgcattttaaaaggtaattctctacctatcccctccacctgtcctgtccagtggaaagtacaatggcaatacttgtatctaaggaataactttgtcatgcaaggtgggctgtttgatgttactatctatcttgcaagaggacatagaatatcggtccattttatacaatgtcacaaaatgtggcatagggaattggatttattgggggaactttataaagccagcactgacaaaaagaaaaggcagagagttcctatatacccctgtataactggagagaaattctagggccagagtacactatgctgtgggtaaaagaccggagaaggaagaaactcggcttctatatttctctctcattggaacaagcatgaaggcaactttgtcagtgaaaaaaaaaaatctctctacttggacattggcagtttgtatttagatgccagtttctgtgagaactgtctattaatagtaaagctatccttccaaattcaagacctctgggcctgtaaataaatcattggtcttatgagaagctcagtttagttatggctcctacagtcagatgggagtgagccttcatgtccctgacatctcactgttcaggtaccacttgggagttaccaaaggcaatttagagaattctctttgttgcatcacagacttataatttaaggcatcagccatgtaatatatgagctagtattgttggacaaggtaaactccaaaatatttcaacaatattaaatagaaaagtgtttctttcatggtcacccacaactgttttgaatctctaagaccaagaggttgcagtctgcacaagggccacttaaaaatctacctaggtgctgccacacacttccttaaaaaatacagtgaactagtgtttattcacttatttattcacatataagccaatcatatttccaaatgattgcaatgccaggcatggtgatacgcattagggagacaaaggtatataaaataatattcctgaccttaagcaataaaaaaaagttaaagaaacaaacatgcataaatatttctagaaatcaaactgagcatgaattaaagtattgtttaaagaattaataaaccatccaggcacggtggctcatgcctgtaatcccaacactttgggaggccgaggtgggcagatcacctgaggtcaggagtttgaaaccagcctgaccaatatggtgaaaccccatctctactaaaaatacaaaaaaaaaaaaaaatagctgggtgtggtggcaggtgcctgtagtcccagctactcaggaggctgaggcaggagaatcgcttgagcccgggaggcagaggttgcagtgagccgagaacacgccattgcactccagcctgggtgacacagttagatcctgtctcaaaaaatataataacaataataataataaaccccagacaccatgaaacagaaatatatattaactttttattgcatattcaactatttaaattgtaggttcataaggtagccttagaagcagacagaataagatatactttatattatctttctttccatccatctcttttaggtttacatgacaaatacactcttaaagttttgtcaaagcaaccataagtatcctgaccactgaatattctctcattaataccataattttatttagttttctgatttggattaccaaggattctaccaatacttgtaagtttgtggcaaaatcaattctatgagttattagacgccaatggttaattcaattttccagtaaacaaaaccattgccagttgccccattctctttatagaggtctctttgggaagtctctggattctactgtgaaatttttgttcatattggcaaggtaggtatgtaaggtcatatattcaatatggaacatctgaggaaagaaaataaaaatacaattttattgaaaccataaccgatattattgaggttgaaagcattgctggcattgaagaaaaatagtccaacattaaaacatacatttgaaaaagaaattatttgtgtttctcaagcacagtaaagaggatatgtggtcctcatttaacatttttattctttttgcaattattatttgcttcacttgtgaagcttcccaggtacctctttcttcaaaatcttaaaaactaatagtagtaatattaccccgcctagccctggcccacacacctgttgtcctctactacttctcttctcctgctattttactataatttcatctcattttctctattttttgcaatgtttgattcccccttattgtagaaaaatggaaagacacagtactgcaatgatagaaatcctctggacagaaatgagagtggccttttcccagtttaaaaccaattaatttgaactttcttccctgttcaaagtaaatgactcttatcctgattttagttatcataagacttcctatcacctaagctgtaaagtacttattcagtccaaatggttggacttcattgctcttatcacaaataaataacaatataaaatggaacaaggaagaactataccactcaattgtcttaaaagacatttaaccctagggtctggtacacaggtggtctggctacccagtgcctttgttcctgcccattgctcactggactgaactagcctcagatggccattgctcctgaaacgtggcatgctggatatctgctgtgtccactggataagagtattttaggggcctaggactactattttttcagtgacaaagcaatagtgtatcattgggcaatgtttatcttcagttatagaatctgcatgaaactttagtatataactctttttatagacacacacacatatgcacatgcacacacatatgtgcacacatgtgcacttctatacatgcacaggtgcacacacacagacacacactttgtggattcatgaggttgccccagcaacctctattactctattaggagtcacacactctattaggagtaaccccttttgtctccctatgcctccttgtattagtcttctcacactgctataaagatgctacctgggattgagtaatttataaacaaaaaggtttaattgactaacagttctacatggcttgggaggcctcaggaaacttacaatcatagcagaaggtgaaggggaagcaaggcacgtcttacatggcagcaggaaagagagacagaaagaaggggaaagcgccagacacttatcaaacaaccagacctcatgataactcactaactatcatgagaacagcatgggagaaactacccctatgatccagtcaattctcaccagttccctccctctacatgtggggattacaactctagatgagatttgagaggggacataaagccaaaccatatcacaccccatacctagaattgataaaggcccttcctctttcagtcttgactccatcctcttttcttgtgttaggatatataacacttcttgcccaggaaaactccaccatatttttgttgtattaatataggctacaaacatttctgttacatctaccctaaattctcagtatttatctatatttgaattcttgaagtgtatcacaattcctggcacaacagtaggtactcaatatatattacatgaactgaccagaactgaattacaagggagaggacagtccatggaaacttcagttccttgttagctaataagaaacagacacaatttttagcattttcccagtagtttatagattttgtatgtatattttgaactgtattcagagtgataagtgcaataatagagaactgaacctgtaacaagtttcactgagcatagagagtagggaatactttataatgggaagcagaaaagttaagcatgttttatttaaaaggggaagttttcaatgggttttgtaattagagttttcttttgtcaggcctaaagggctgacagtgggagagaggtgtgtgaaaacagtgttccagaaagaggcagcagtttgaaaagccatgaacacattaatgaatatactatgagaagataacaacaactttggagtggtgctatctggatcacataagataacacatgctgaagagctctacagcaactggggcagagcagggggttggtaattgttgaatgaacctatgtattaactcttaggttctgcagcgtttttcccctcatctttgactatcagttttcaacattaaatgaacgatcaatgaagttatccatgtgccaggcttttaaaaaacctggcttaagttgaatcccattaaaaccagagaaggcatggaaaatcacaaaggtgtctcttaaggaacaccaggtttgaagcatgtggttgaattggaaaatggcaaatcattgaaaagaagagcactaaaataacgggagcatcaggaaaaagcaaagaaagaaaaacacaggttttcaaacaccgcatgttctcactcataagtgggagctgaacaatgagaacacatggacacaggaaggggaacatcacacaccaaggcctgtcaggggttaggggaaaaggggagggagagcattaggacaaatacctaatgcatgcagagcttaaaacctaaatgacaggttgataggtgcagcaaaccactatggcaaatgtatacctatgtaacaaatctgcacgttcagcacatgtatcccagaacttgaggtaacataaaaaagaaaaataaaggttttatttcatatgtatatgttgtccctaaaaaagtatttaattatattgttaggctaggcatttaaattgaatccctctaatcataagaaaaatgacttattttactccttagctgcttagcctgtggtctttaaggaataacatacattactgtttagagttagggcattcttgttcaaatgttttattttctatatgttgttcccaactaaattttactgagataatgaaatcttcagtgaaaagggatacatatgatctcagacccttaccttctaaactaatatattagaataaacatactatgcagctgatacgatctacttagctttcctgagtctgatgactgcaaaggccctgcatatatgcagcaatagagtttcatctcttttcagtcagtttacattatttcactcaaagtccttggaaaataaagtgcccttttaatatggatttaaatgtgcactcagaatacaaaattgcgtgtgtattctatggaaacaagtaacatcctgcagttaaatacatttctttgttactatgcatcccacgtaagtgcaaacattaactttttttaaatacttccctccagaaatggctttcttacctgtagtgtagacacaggcaagaaccagagtaaaaagatttatccacgaaatgttttttattcaaaaccagtaaggtagagatatagttttttttttttttatcaaactgttttacgaggcttatgttgttattccagttccatgaaccccacagaaatatcctgtctgtgcacaaaaaattctgatttcatgcttggaagaattttatcaaatatttagaaacagaaagtagttattcctgtgatacatgcacatatcattaatactcaggcacacacactttcgttcctcacacatgctgatctagataaacagctgaaagctatttcacatgaattatccaagaggaaatttttagtgcaaaaaaatgtaacctttgtactctatttcttccaaataagagatagatatttagttgtagttataggcatcccagaaaaaaaaaatacaaaaatgcattgtaccatccaaagattttgtaattaatcacttagatttagtcacctagtttacaaatagttaagatagggccaggctgtccaggtttataactagctaaaattcatataagtcgactgttgataaaacaatggttgactgcatgagaaaattgtaatgttgggtaagaataaaggcttcaaaaatatttaaatatatatgcatgtggcttatgctattgtgctctgctcatatttactaggtcattgattctcaaaatgtggtctttagactagcaacatcagcatcaggtaggaatttacaaaaatgcaaactccatagcggacctactgaatctgaaactctggatgtggagcctggccatcttgctatagcaaactcaccaagtaattctgaggcagcttaaggtttgagaaccactgctttatttctagactggaattcactaaagatagctcctgtacacagtcaatccttcagaggatttccctatgctcaccactttgataagttacttgaaaccaaatccctgctcagagtctgccttggaggtgactcaagttaagaaaatgtgtttatatgtcctaacaatatgctttcatggaagatttgctgcattgaattataatttatttttgcaattttgatttccttacgtgaatgtgaggggatttttggctttttaaaaaataatttcaacttttattttggattcaggggatatgctttcaggtttgtttcctgggtatattgtgtgatgctcaggtttggggtttgattgattccgtcatccagctactgaacatagtacccagtagttttgcagtccttgctcctttctcccaccagcgtccagtgtcctttgtttctattgttgccatctttatgtccataaatactcaatgtttagctccaacttataagtgagaacatgtggtatttggtttctgttcctgcactaatttgctgagaataatggcctccagctgcatgcctgtcgttgcaaaggacatgattttatccttgtgactgaataatattacaatgtggtacatatactacattttctttatccaatccatcactgatgggtatctatgttgattccatgtctttgctattgtgaataggtaattctattttaagttctgtgtgaattctccaaattgctttccacagtggctgaactaatttacattcctaccaacagtgtctaagcattgaatgcgagtttttaagagcaaaagatacaaggcataatttatttttacattttctaggcccaggacggtgcctggcaaataagaatttttcaatgaatattggtgtaataaatgtagaagtacataaattggatatttttaagttattttaaattaaaattgatgatattatatcaccaatatacttatattgatgataagtgtgtcaaaggttatagctgaatcaacaaatgcctgcaattggtagttaacagttgtagaaattccaagttgtttcaggttagctaaaatgtaataagaaatatgtataatcatagcattattgaagaatataactgacaactctacacaggttctttgggggacccttagcatgctttaatttcagcaatggtatatttaatctacttccatgcattgacagttaactatatgtgcccagggctcttgtattctgggttcaagttatgtattgctgtttttgacaggaagtgctcttttatattcatatttaaacatttactgctacaagtgtaagtgtttgaagtattcataaagttatttttcacatagaaactgagatttcaaggttagaatcatttatccctatagagagaagatataaatgaaaatattaccaaactctcagtgtggatgaaggtcatgacaacactgctatatcaaataaagagaaaaaatagtttgcaattattttttctaaacgagacttccccgattgtgagaagctatttatttctgcaatacagtctgtgtggcacaacctctatttgctacctactagtttttatttttataacaatttaaatgggtacagtaatttatagctagtgagcagaatctcttagaaaggggtatcttatgaagaaaagtattattatctatatttcttctcttgcattaattttcctttggttattgcaaacattaaaggagaatataggagcagagtaattatcatacttaatactctccagaaatactgtatattgaatttgaataggctagggaacttattaatcaattggtaaaacttgcaaagcaccaccaaatctatgttttttaagtatataaaataaactgaaactgattttttttctagtaaaacatggtgatgtgtatgtctcatttatttcaaagataatatcttaggctctgatctagagttgtttcatagagaatgaacatgaaacggtctagagttcctttttttggtggattaaacatagttctttccttctcctgtatctctactttttggcataatctgtcttttatccctttttactcatcctctttgtatccctgttataacacacatggttttatattgttctgagtgttcttcattgttccatctgtagaatatttttcatcctcttctagatctggaaatccaagatctgcccaacatctggaaaggagcttaccctgttcttttttaacacttttgtttacaaagctaagagatttcatactccctccccaatttccttgttggtaattctcctaactaagattagaatcttctgtttaggtttattttctgtgatcgtcatagcaaatttgtcatgcttcataaaacataaaataaacagaaaaattctcataattacagggttggaaagctgaaccataaaggaatctacatcaacaattcccctcaataaaaaagttcaatagcagagatttttgcaaaaagatttttaaaagaaaagagtttttcttaatgtctcacttgctggcccagattctttttcactggggaatatcgagtattgttttgatgattggaaagttgactttttatcaatttagcacttgctctaaaagaccatattttgagcccaaaactgagctgtaagttttaagatgtgcacgctttctgaattgtttatcctccttgacacaaggccactggagaaacttgcaccaaaagattacggttaaacaaaacgaaacttgtcctccccggaaaagaaatgatgtgggaaaaacacttcccctttggtaaagctactgcaaattaaaaagaaagatctcagtgtgaagttggtgatgttttgttgcaaagaaaaaaaaagtgcaatgaaaactccatcagctctttcagctgagaaaaagaacacaggaaaatgaagtgcagggaagactcacaaagctcttttggaaactggagactagaagctttacaggtaaataccaagctagcagaaaacaaatctcagtggcctggcatgtgaacctaatgatgtaacagaggatgaatcaatgtttatcaaattaatcatccgttaatgaaccttctaattaagagtcacaggccagatgaagtaacatggcaggtaaatacctcaaatctggagctgggggactgtcaagatcagaataaaagtgtttccactaacggcaaggaaacaaacagggagatgttgcatcctgaaaaaactttaaaatgatttttataaaaattagttatctgtggtataattgttgttgttttgttctgttttccttagtgcttagtaccttatactggttattctaactttatttttaagacattgatagaatgcaaaccttaatttgaagtctttgctaaagacagggttttatgatgagtgtgtgtgttcagtctctggaaggagtggaaaaacaactacaaagaactttattcaggttatagccaaaagaaaattgggtcggatatggtggctcaggcctgtaatcccagggctttgggaggctgtggtgggagaatcgcttgaacccaggagttctaggctgcagtgggttatggctgcaccactgcactccagcttgggtgacagagtgagaccctgtctctaaaataaatacatatataaaaataaaagaaaatcagtggaaatttctttataatttgttaggaattgacaatatatcactgtgcttggtaactttgttaatctgtcttctgagcttattaacttatttacagaactggaagacacaggctatatactgtaaaattatttgagtcaagcaaagcaatccaaataatttagaaataaaagttcacttatacattaacaaaataattaccttgataaaatttgcttaatcaaatatattcagtatttaattatcttttattgaaattttactcttgtaaacagtacaaggcaaagtttttgtagcatgaaataaatcaaagttactgcaagtagctggaaatatctgagttacatgaaatttgaacaagttttagaaaaattagaaatattgtcattagcaaatattccctttgttattcccacccatgaatggattccatgtttagaaaaatcttgactgccaaactgcattgttcagggaatatttaatttgtttctactctttattaatagaagtcctataatgcaaatatctaaagtagactgttttcccacagtgaatagctataattctattccaaagcaaagaaacccaatgtgttaattagtccatacagcctgatcttgaataaatgtagaatttccattagcattttggacattttcaaaaatttttaaaaccctgtatccaattactactctctaggaaatttaggatctcagatgtcccaagctgtaaaaagatttctggaccccagagaataattagtaagtaacaacagttacaacaagagtgaagctcagacaaaatcaaccttaactaggtttttattgaattgcagaatagaatttatttttctaataaacagagtgcattttaatatgtttggcattttactgttctacttacttttcatttgtgcaattttatttgatcaagctatgatatttttagcttccagaacagttacctccctacctagggcacatccccagaagcaattactcctttaattagctttgactcattaatctttgcctcttctgctttcctttcaagtggagggggacttcccatccatttgtgtagcataatgcactatcacagtaagtttctctttacctctgcaccttactttttaagataatacttcccttgtcaaaccatcctaaggattctattcctgggatgtctgagcataataaataggatgctccctgtgttaaggaaaaaaaaaaagaatgagacctttgatctcattaggtctccacagttatttttttaactcatcatttattactgccataacataatactttaaatgtactctctctgggacttgccatcttgttgcatgtatacagaatacatgtatacacacatgcacatatatgtatatataagtagataatttagcataggaattgattggctgaggtgattgtgaaagccaagagtgccacaaattgccatttgtgagttggagaactcagaaaagccagtggtgtaattcaggacaagccctaaggtcagagaatcagggtagccaattagccaatggtggaaatctggacctgagtccctaggcctgaaagccagaagtgctgacgtctgaggacagaagaaaatgatgtcccagcccaaacgtcaagagtgaacttgccctttttgttctatccaggatagccttttgtgagtggattgggccctgagtggattgacgatttccactggtatggatgaaggtaacaagttctttactcagtctacctattcaaatactagtatctcccaaaagcaacttcacaaacacactcagaaattactggctgggcatcctttggcccagtcaagttgaagcaaaattaatcatcacaacatctatgactatcaaatctccatcacagatactcttaatttagcggatacaagctaataggaagtaacagcagaacaaactcaagctccagggcagtgtttatatcagagtgctctacttttcacacatatttgccttaagccatgattcttttgacctcttgtgtcactgtctgctgctaatcaaatcagccatgagcgaaccatcacatattcatttccctcacttccctgttccctccaacttttctgagtgtcttggtctaaaactgcgtgttgcaaggggcaggtggtggggaggtgaagctgtaataaagttgctctttcgcaaacaagaaactactatataatgtcagtttctactttcagtgcctgttgaattaaaaaaaaatcatcatcataaaaaaataaagataattataagagaaaagttgaagaaacttaattaggcctttgaaactagaaatcaataccattaacttccaattaaacatagctaatttaattctctatgatactaaaagatcaatgatgaattataaaagtcaaatagtttgaaaaatgcaacagatgagcagaagcacaaagtacattttagaaaggcattttttttggttcatgttgtcacttcttttccaagcaagtagtcacagaagagacaaactgtgtttgtttgtttgtttgtttgtttttactttaagttctgagatacatgtgcagaacgtacaggtttgttacataggtatacatgtgccatggtggtatgctgcacctatcaacccgtcatctaacttttaagccctgcatgcattaggtatttgtcctaatgctctccttcctcttgccccccagcccctgacagaccctggtgtgtaatgttcccctccctgtgtccatgtgttctcattagaacagaccgtcttttgaaaaggaataggaatgggagaagtagaaggaatgggagaaatggctaatatataagaaataccatttaaccacaagaaatgttactaatggtaaatattgcattaatggaaagtataatacctagtaaccatttcagtgctcctagctccccagataaaaaagcttacatgtttcaactaactaggcagctatgtgagccttcgatagccaggactcactattttcttactcatcctctttactttcctctactctctctaccttttctggtgccttctcccttgaggacatgatgcaaaatagtaaaaattttaaaaacagaaattctaaacaaaatagctgtgataggaatctttaggaaaacagtatggagaaatacttgcctataatctatgtagacatatatggaaaatttatgagtgcggtactgagacagaattttacaatatttatatttccagtaattaagtaacattagtagccctattttaacaaaaaaaagaaacaatatctgtgaggttaaatacactgggtacttttatgccagccatgttgccattaagtgacagaatcagcactcaaggcagagctttctgccctcaaatctcataattctgaggaaattctgtgctttcattcaccaacactcaaggtttcttatgtttgcataacatttcacgcctctgaaaatactttgaagtttatgacatactttaaagagaaaagacaccaatgagttataaaataacatttatagtaggtaagtaaatatacaggcattataccaaaatgttaatgcatgcccatcacttagcacatttcctgaatgaaagagaagtgcctaataaagatcatttgtatttttgttcttttttgcttgccctgattttctagtttcccagaatgcattacatagtatttttacaacatccatgatctcatccatgatcttgtccatcatcttagaaccttgaagcaggggagtcaaggcaagtgttaatattcatatttcataaattcatagaatttcagtaaataaaataggatatgtctcctaatcaacatcaaaacagctgatgtcaacaaatggaagcagcttgctgcttgtctcacagtcctgttgtcaatacagtggtttctgccttcaagaagctgggtttcacgttcttttcaagggtgtgtgtgtttgtgttcatatgaatgcaccacgtggtttgcaggaattggttggtaaacagagaaaacatattgattgacagtgtcaagatcaataaaaacctgggtaatctggcatcaaacaaacctcactcaccatgccttgctttcacatccctgccattgcatttgtgccttttaaagctttttcagcattctgttacttccttacgctgttttgttctaaattctagggaagccattatgttacaagtccatcattattattttctttccttgaaaagtcaccatttgttttctaacactgtcacatatgttctaggttattatttctgtccttttctcactttaaaatgggctatagtctttctcccatcagagtattgattttgcttttaaaaaggcctccctattccattatctcttctgatcaattcagtccatttgcatgagaatttttccctctttcttaccacccaaactgtctttgtttttatttcactttgctctatttgtcatttgtagagcattaattataactccagagtttgttttgaaaagtgttggtttgctttgaaaaaagtcagtccacttgacagttttgatctctcttttgacatgtgtttactcattcactgaacacttatttgttgagccagacatgatagacagtgctgaggttaatgaaattaaaaatagtgaatatttttctatgcaatacatagtaagttgtcaccaagtgccaggcaatcgataaaggacttaaaactattttaatgaaaataatcagcatgtattgagaccagaaaatttctgaaagttttatatggagaatatactttgtcctcagaaacaccctatgatatagttactataattatcttctcaattttagatgagaagcgaaggcaaagatgaaattaaattacttcatcacagctggcaagtggcagagtcaggattcaaagtgttctttaccactaaacttatctatacgcattgttttctatatgcattgtatgtgttttgtattactatctagtaagcatgtaacagatcaaagtccaccaaaggaaaacatgtacattcccatttacctaaaacgtttcctagaaagttcaattccactttcccaaaatctacttatccacttatgaccaaaaaaaaaaaaaaaaaaaagcctcaagggcacagatttattgtattattctcctaccttatagctgtcttaagataccataatcaatggtttttgggcaggctgacatactaaagaaccaaataaaactcagttttagctatattttttgcttactaattatgtcctataagatcttatttactcactaataacacttgcttttataagtctctcctaccctgtatcttagacactatactaagtacaaggactactatcatgattgtgacattgtcacctgtcctagctaatattttaatttttttaattgtctttgaaatagttccctctggagtcttccaaatctattaaataagttacctgataataggaaaccttaaatctttgtagaaattcttcagtatccttcagtgtctttcaaggagtaattacttaatatatgtttgttggaatgaattaaaagacattgacctccaataatggctaatggatggcaaaaattactatcatatattctataaagtatataggagcctgagggtctgggcagatagatgagcaatttagctttatataggtatattcaaggttcttaccacgtatttgtatcattttcttcaatttttatttccagtatatttcactgaatttatatatgatacaatttgtataccttcagtgtggagttcactaaattttaaatgtagactccattctaaccagcacctcaattataatttacagcattgacataatcttagaaagttcattattgctcctttacaaaatctgcccctccagcctggccaaagcattcactgatctaatttctagcatcataaatttgttttgccttttctaaaatttctcaggaatggaattagatagtatgtactatttggggtaagacttttttgactcaatattatatttttgaatttttttcacgctgctgtatcagtggtttgttccttttattgctgagtactattctattacaccacattttgccactatgtgtttattcattcccctgtttaagagcattctagttatttccaggttttgctcatcgtgtataaatctcttaggatatttccttacaaatctttttagaaatatacattataacctttcttgggcaaatgcatttaaatagaaaaagtgagtcacagtataggcatatatttattttatgaaaagaaaaacaaactgtcaaacagtttttgaaagggttgcaatattttacacgctcatcaatgatgaactagagttttaggtgcttcacatgttctgcaatgtttggtattatcaggtttttttgtttttgtttttgtttttgtttttgtttttttactattcatatgggttcaatgtagtatcttttggtggttttacttttcatttcattgatgactaataacagtgtacattgttttatgcaattttggtcattcccatatcttcttttttgaactatctattgaattatttttttttcttgaggtgtgtctttaatattgatttgtaggagttctttgaatattctgcatattttttgccaaatatatatatagcaaatattttcccctagtttgtgacttgcctttccactttttaaatgatcacttggagagcagaacttgtttttaattttgatgaggaattttttttccatttatggttactgctttttctacttcaagaaattttgcttaccctaatgtcaagaagagactgtcctccactttcctcaagaaacttgtttacctttaggtttcaaaaccatcttaaattattttgggtatatgtgtgtgtatggtgtgagacaggggtcaaagttgattttgttcatttttggtttagtttgttttataatctacatgttcattcagttatttcagcaccatatattgaaaacttccacaactgaactgttttagtgcttttatcaaaagtcaattgactgcttctatgtgtttgcattgctggattcaaatattccattgattcatttgtctacttttacattaatacctcttgactacctttgcatggtaggttaccaaataatacctatgacattaacaggtaaatgaataaataagcgatgtttatctaaaatgtagaagttaacatatattatttaaaactcatttaaaaaaaaggggaataaaaacatgctaagaagagaataatctgaaatttgcatcaatagtaatagcctaatgaagattagcttcattttaggcaccacttcttgcaaaagtcttttccacaaatcagatacagtaagatctaattctgtagatttctctaattttgacaattctctgtattaatttttaggtctcttccagtggaaagaaatatatttggcttggaatgagagtttaaaatagattttccatccatatccaggaagatgagaatcttgagatttctagagtaacactgttaagatactcttgcagcaagagtagttctgggtgtttccctctgattatctcatacctaatatatatcttagtttagttttatttttgttttcttcactcagaccaaacacattttgaagaaaactgagcaacatagatatgatgattactgattgtcattacagtgtactatagtatttattttactaaatcataaattgcctagcttgttggaaagattttttattgttatagagtttgaagtattaggaatcacatcttttttggcttttctaggtttaaaagaaatcccctaatcatataaaatataaaaatctccgtgcatggtacatacatatacatatgcaacagggaagttaatgatttaaatataactagagtaagttctaaaattatattataaacaaagatacagtcaatcataggaatttctactgggctacttgcctttcagagtgaatcggttctctagtatcccaagagagcagattctcttttggttttgtttttgtttttctttataagacccatctttggggttaacagaatcctaaatcatttgacaattgtatctgaaatatcttcttctggtctttgaactcttactttttcatgacgattgtgatatttacatgtagtaatagtcagtgagataggaaaccctaaattcaccatcacctatgtttcagcaggagctagcagacttctcctttctaaagtaagacattactcccaattcagagaaactattgggtctattctatcagaagcatatcccgcaagatttgcaaattaatagtgtgcaaaaatactatattcacatattattttcccagataaagttattaaaaataattaaaataatccagctgcaaaaacaattctaagaatatagctctttgcttttctctaggaatttcacaatatttaatttggtctttgctattgtctgtttctctcataagaatttccttcatggtaaagaatgtgttccttatttctaatctaaattacttttgcttcaagtatatttttactattatttttgttaacttaaaaattatgggaaaaaaagacgttttctcctttagaatattttaatcttttaaaaatagtctttgatatctactgacagcttccataaaattatctctcacttatatgagttaaaacattgtattttaaatatgtgaaataaaaccctaattatgttgttataatttataattcaccctgtcactgccttgcttcaaagcatcctgtgtttcctaattgtgcatccacttaaattaaaaatcatatatatatattttatatgtatatatttattttatatatgatggttcccaccctaatctgggtgaccaccatctaatcagctgccagcatggctagaatataaagcaggcagaaaaacataaaaaagttaatatatacatattaacttttattgtatgtgcaagtttgttacataacttcaaagcccaaaacaagttacccagagttaatgcacgtagtccaggagttgagagccaagcgttagccccctgaaatctctcaaaagtgaagccagttggctgaatccaccctataccataatcaaaccctcaaggtcatcaaataggatttaaaaatcccaaattatatgtttctatttttctatatactacatattatggattgaatgtttatctcccttcaaaattcatatgtcacagcctcaacactcaatgtggtagtatttgaagccgtggcttctgggagataattagggttggatgaagtcatgagtatggggtccttatggttggattagggcccttttaagaagatactatagagctttccccctatccccctgcctctttctttattacatgaggacacatctagaaagcagccacctgaaaactaggaagagagctctcaccagaacccaaccaggatcgcagacttctaacttccaaaattgtgagaaaataaatgtctgttgtctaagccacttagtctatggtattttgttatggtagcatggacagactagtacactactgtgatggttaatactgagtgtcaacttgattggattgaaggatgcaaagtattgatcctgggtgtgtctgtgaggctgttgccaaaaagattaacattaaagtcagtaggctgataaaggctgacccacccttaatatgggtggcatgatctaatctgctgccagcgtggctagaatataaagcaggcagaaaaatgtgaaaagaccagactggcctagcctccaagcctacatctttctccagggctgtatgcttcttgcccttgaacatcaggctccaagtccttcagttttcagactcagaatggctctccttgctcctcagcttgcagatggcctattgtgggaccttgtgatcgtgtaagttaatacttaataaactcaccttatatctatctatctatctatctatcctactagttctgtccatctagagaaccctgactaatacaaccaccttatttcaaaataggatttcagatggcttatacaatatatcatatcaactgaaaaatgatgggaaaattaaaagcaaggtaattagaaacaaaagcaaggacaaggcttgtagcaatctgatgtctgtaaagtgtgctagacatagaccatacactttccgttaagttacctataagccaaaccaaagaggaaatataattagttaagtagcttgcaattactattacttaaagagaaataaatgataaggagagttatgcctggtcatgagatttacagaaagttcctcccagtgattcctcataaagatgatactctaacactgcaataaggagtatttgcaacagcacgctttgtggcagtggctgctgccatcatgtcggctgcagcacagctgcggctgcacactccatgaagcctgtgggagccctgcctcttctgatttgggacagaagctccccaggtgccactgcagccactcaaaccacagctgcagatcctggcctcctgctccacaaagcaggcaggagccctgccctcctggtcaaggctacagccacccaaactgcaactgtggatccgagcctccctgtgctcttgagggagccaggaataggcaggatctgccctcccagatgcagctgcagctgcagcacctgtggctgcagacctgggcctctcactccaggaagcaggcaggatctggtgacaagtgggagcccggccccttctgagttggcagggtaggagctcagtgtagccatggcagcttccctggggacaggaaccaggcatctctgcgggggcccaaggaaggacacctccctcccactgcaatctctgcaggctcatgggtgtctgctctctctcgcttgatgtctgctctgatctcagagccagggctggggctgagccctgaggtcatgaatgctagcaggaggcaaattgattcctgggtggaagggggtggggtccccagtaaggccccaccctcaggccagggagggcctgaaggctgggagctgggctgccagtcccacaaacaggagtgggaactcctagtgcctcttcctgccagcccgtggccactcatggaccaatcggcatgcacttcctcccctctgaggtccataaaagcccttggctcagcccaagcagggtacaggacggcaagaagatgaagagggcagagagacaatgggacaggacaatcaactgcagagaggaagagtactctctctgctgagagctgcagagatgacctgctggcacagaggagttacccactcctctgagctgttctaacactaaatacaactcttcttcatccttcacttgtctgcatacctcattctttctggacacaagacaagaacttgggcaaaggcaccatggccacagaggtttccggcctgaaaaatcaacaccccagagatcctgtaacactatatccattcctcactcctttctgcccactctgtgcctttggagagcagccttctttggactatcttgcactctgagataaaccaacagaagaccaaagagagaagagacagtgtaagatgtttattcacatttctcccacctttccaggcctggtttcagcagtgactatattcttctactttagacaagaacttctggtgaatggaggctctaccacagctacaacttttacacagttgtggtaagaccattcttgctcttgcttcttcaggtccagatgatacattactatcctttgttggttctcctaaccctctattaatcattcttcaatcaggctcttgtccattaagcctttgaaatctgtcatctccttcctgcctagaataacggcaaatctatataattccttcttgtattgtccttttatataggcaaaatcataatgccaagggtaatttaccgaaaacaattatacagtgttatgctttgcattaattcacagataaagtttatactcgctataaaatatggataaactcttgtttttaaaaatagaacacaaatactctcagatgcatagggcaatatgccagcagattcagaagccacaagacaaatacaccttttcccaaagcactgtttttttcttaaatgcctattttttttttaatttttaatttttatatttgtcatgcacatatagaaatagaaggtataaggctgggcccagtggctcatacctgtaatcccagcactttgggaggccaaggtgggcagatcacctgaggtaaggagtttgaggctagcctgaccaacatggtgaaaccccatctctactaaaaatgcaaaattagccaggtgtggtggtgcatgcctgtaatcccagctactcgggaggctgaggcaggagaattgcttgaacccaggaggtggacgttgcagtgagctgggatcgcaccactgcactccagcctgggtgacaagggtgaaacttcatctcaaaaacaaaacaaaacaaacaaaacccaggttttcttaatatttggggctttcagcacaacaagcaattttctaattctctgtggacataacctgagtgtcctacaacttaatccaattctgataatatctatcttgagatagcatcatattctacagattgatgtaaaggataaaatgaacagccagatgaagagatatatagggcaagggccagggccagggccagaagattctaaacacagaagcacacagttgtgttcttgttcaccaacctctctgaaccttgtccttttgagtttttatagagacttaatattatgtgggcatgactgactaaatgattggcaactggtgatcaacttagcattcagctcttcacccctccccaaatgtcagggatggggctgaaagttccaaccttgtaattatgtgcttatttccctggcaataagccctccatcctgtggttacgtaggagctttcaaaaaaaccagttcagtcacataaagtcaggtgtggttgaaaggtacttgttatgaataaagcaagatagttttttcacttcttcctctcttgagctgctgcagagaggtttcaggaacagaggacacaggaccaaatattatttaaaaagacagttctattgcaatagttatttaggaaatcacatagactttagttgccatgaatcaggaactctcaacaaagtccaaaacatatgtgtttaattatatcacaatattatagagccccacgctgtggtattatgactacagcttaactaattttatctgtagtgatcacatttctgaataaagtcacattctgaggtactgagggttagaacttcaacatatgaatttcggcaggacataattaacccataatagtagtgcactgataaaaattgttttctttacatcatctcttttgatgccttctgtgcactaataaaatactatttgaatttctatgttagttgtcagttactataattgtgatttcttttaataattaatattccataaaatggtcatttatatgcttgaacctgggaggtggaggttgcagtgagccaagattgcgccactgcaatccagcttgggcaacagagtgagactttgtctcaaacaaaaaaaaaaaggaggaatatttataattgttgaaatcactatcatttttacatataactagaaatagatatatcagattttgatcaaagtttgcctagcttaaaatagagataagacatgccttcaagttgcctcaaggagaaattagttacatcaaacacatcatttgtgtacatggtgaatcaatttattctactattttaagtttccattgcagactgagttagatattatgggaagatccaataactcttattagaaataatttaataatttagcatactaaatagcatccttctggttggaaagagtgtctcatatatccctaagatgttaggggtatcctttttgtaaactccatataattcaactgcctgtgaggaaaattttgaacataaattttaaaaagtctatgatctgtttgattgtgctagcgtaaaactcatgacaacatggacttttctggaaataaataaaagaataaaggtataatgtaggccactataatgtcttactttttgccttcttctactgagttagctaaggcattactcgtacattgatttgttgttgtggttgttttaaaagtacattttaaaagatagataattgttgtgactttttaaagaaaaaaattatatatgcctgatttaaaataaattccagcaatacagaagtgagagaaaaaaagagaaagaaagaaagaaagaaagaaagaaagaaagaaagaaagaaagaaaaaagaaaagaaagaaaagaaaaaaggaaggaaggaagaaaggaaggaagaaaaagagataatatgttttggagaaaatattgtggacattattggacttagtaactgattagataaggtcattattaaaaaataagaaaagtgaaagccaatgttaagcactagatcggtactatttttatcatgggtaggacagtgatttgtcatcacaggaatagacacttaaccgtcaggtacagacttgtcctctttgcttatagcatacaactaatatttgtggattgcagaggcattattcattgactacggttccgctgaccactcatttaatggcaatggaaatggagcaaaagattcatgctcatagaaataatgggtcttcccatgtacctcattatgtagaaaatactagcttgatgaaatagtagattatctgtcaaaagatcaattggggtgccattttggaggcaacactatgtgaagttgatgtgctatcccacaggatgggatacaggccttcaatcagcagtcaatacacagtaatacctaagcccaaatgcttagtccaggaatcaacagatataggcagcagtgaaccactattaccactacatctgtaactcatttaaagaatatctgcttctttcttgtcccaacaaagttgacctgcaagcataaaaacaatctcaagatgaaatgcctctattttacagcatttacttaatgctgtttgcatttaatttgcatttagtttgtgtcataacttgactgggaaaaagggtttgtgtatttgtgttaagtttacttactgaacagaatatttataacccattttatttgaaagtggtcactataaaatactgtaagtacatataagaaataggggagttgttttcagaataaatctcattgacaaatatttaccagacatgaacatatacagtctgctgtgctaggttgttgttcaatatgcagaaataacagaatcaatctcagagtttctgggttcaaatcacaaggttgcatcttttttagcagaggaaaccagaggctgtctttggcaaacagtgttgaaaataacattctcaaattgctacaggaagaaaatcaatgtctaattcacacattttattctcagcccaaccagacattttcttatatttatgaagaacttgaggaaacacagcagcccttcactgttctcttcaccaagttaactcatggcttccatggtgcttatatgatgcatgtgtgtctaataaaaagtcaatattgtgctaaatacagtttagcctatttttattttcatatgcattatgttaacaaataagtttatgttagtatattaggaaagtatggcattcctgacatttaatatacagggttatattcttttggtgttataatttctgttcaagtttgatttctgagaatacaccattggcctccctcaagaacaaaacatctctatatcctcagtgccttctacaatgtctgccaaataataggaattctgtaaatgctagctatgctttttttgttgatagccagcatatgcgtatagtttgaaatcatatttatttattttaaagtaaattcataattttgtcctaagatatatccagaagcaagcaataaaactaggctgactgctaagaatcaaggttgaccctcaatgtataagctttcagaatcagaatataagtaggaggtccaggaatttcattgtaaatgcctaaatctcaaagaagagctgtgtttggatctcctcccctgtattggtatatatctatgagctctgctcttgaaggcagacaactgatactctgattgctttccaaattgaaagcttcacctgctgtttgcaaacgtgttctcttctcttctgccctgttattgaacaaacaggcattgatttctatctctctcttaaaagcaacaacatcccacagataataaagacagccctgcctgcttagtgaagaatttaactgagactgatattaaaaaaaatatattaagactctgattgtttcacagtctgttggtagatagattcctgttatgaaaataatgaatctgatgtgacagatggaacaggtgtaactcactaactattaatacatagattcccagagagaaaagtatgtggaagatatttatgacagtgttacagctgaaagcagttggctaaacagacatatcaaaggtggccaatgatacttgtgcttagtaagcagaactaaactcttcttttggatgaagatcagcacttccataaaaagtaaagaaagggaaaaattttacattgctgtcaaaaataatagaatagatcctgcttaaggtgctgaatacttagtgagccatacactgaatagcctgttattaatatctatttaaaatatgtgtttcacttggattgtcagtgtcctatttatgtttatttattttaaaataccctttacatatgacctcgaaaataagtgcatgggaaatgaataaaaggagacagagagattgattctgattcatgatggaaagactcacactatctgcaaattctctgaatttatttaaaatttcgtgattaatcaatcaactaactgatccattgaatcaatgacttattgatttatttatgccttttgctcttcctccaatattatgttttatagtctttctgtcccaggaactctgataagtttacagatatacagatataaataaatcattatagggatctatttattcatgacaaatatcaattacgtacatatatatatatacacacatacacacacacatatatatatatatatatatatatataccagtgttaaacaaaaaatcatactggacaaaatgaacagacagaagttgattttattttgatgctattgccagcaatagaagagcaaacacaggtcaaatccggatacccagctctgtaggagaatcagaggcaacctgtgtgtgctaattggtgctacccaaagaaatgtaaactctgtgtcttcatggcaggaggtagtttacaagttggagcaacctaggctcctccctttccaaagaaactggaagataggggcattaccttttgtgatgattacattttaaagagagatttcccaaatccttgagaaacacattcctatattgtaaagccagcaaggagtttctaaaatgatctacatctcaaggggcaggggattgatttataattgcaagtttgctaaaacaaatgctctaaggaaagggaggccagaagcttagagtcaggaacaagcctgtctaatgtttagtcaggctaagggaaatgttaattccatcacggtcactatgcagcccatctagccccatgccaaaacacaaagtattctatttgagccaaaaggttacataaggaatggtttgagtgtcattcaaaatctgtattgaccaaatcaactggttgctttgggatgcagcagaacaggcactgataagcacacagtctcttgcaaaaataagtaaaattagaaagaaatagacaggaaaaggatttgctgagacttcttatgttccaggccctgtactgtgtgttgttcatgcattaaaactaacctaagaagtcaatgttattgtatctagttaacaggatggaaaagtgagcctccgtgatatggcttgcctaatgtctcaaagtggaataactgggagaactggcatttgtacttaactttgtttggtttccaaacaccaggttcaaagcattcaagaatgttactttcagaaaacacagagttatggactaaagacattgaagtttcaattcagtaaaattgacaaaatcttagaagtgaggacaagagaaggaagtattgtcatctggctcttttgaatggcagggacagctggcatttcttttctacctcacattaaattcttctaggaaattaggttgttcctgtctctactgtggctatttaaacaacaacacgaaaggcacttttaaaagaaaaatacatgtatgacattgtattccagaaaccttggcaagaatttttcatcttaatgaatgtactcaatgagattcctgaacaattgtgtatgaacacatgagttaaccatttaaaagggacccagatcgtttagaagtctttggaaatgaagatactgatagctgggcattttcctggaactggagtggtttcagtgctccagggatctatttttcagtgattttattttcctccctacctccctcgcttcctgcctccctcccttccttccttccttcatatctggcagaattggatacaatctttagtcttctctttttactctgtcatcagtaagtggtctggctgcacattataaaaacacactggggaataacaagaacgctcagaccagtattatacagcactggattctcaagagacagtcttgtaattttatttattgtttgtttatttaaaaatgtggtattggagatatatgagatgtatgagatatatactactgacaaagatcctgaggataccacagaaagaatatatgagcctccaacacactacaaaatatttcagagggttatattttttggcccagaaaataaatgttttaaatatgcttttactgaaatacaaaaccagtggagagaagcatacaaatcatcagtgcatgaatcaatgaatgatccatgaagtccataagtcttgcaaacacctcccagaccaagaattatggtgtttactcaccccagaagcttcgctgaatcctcttccaatcataatccctgccctccatgcactagcagtcccagacatcctatatccaatctaaaattcacttcctataaaagctagtcttgctttgacttgcctttactcctggcatgtaaactttagggtccttagcccaaagtcacaagagagcttagctccagtttttatcctctggtcctcatgagtctgttcaaaagatttcaatttctgagctgcttggctgcctcttccaaaatgtgcatgtacctaggggaaaagtgaccccaaatgttgagcttacttttctgcattttcttatctacagtatcttcatccagtcattcttcatcatcttattagtgccctgatgactttgagcaggttgttgaaattcaaattttctagttgatttcagtgggcaggtctgttcaaagtactcattctactattgccagcagcagaattccccttcacagacatttatggcaaccttattgttaaacaatggaataggaggcgtgtgtgtatgtgtgtgcatgtgtgtgctgataaggaaataggttttaggaaggttaagcaatttccttgacattatatacctagtaaatagatgtcttgttcagttgctctatatgtatgactttaatttgcctctgaaaagggcatttagaagtttaaaaatacgccggcttttattccctctcacaaggcaatcaacaagttaacatagttctttggcattttataaataaaatcccttagaataggactcagaaataataattattaataatttctgtccctgtaaaactgacttagtttcatcaaagtcctttgattatagattattttcaagcatcttttcattgagtcgggatatggcatcttagagctaatacaacatttctctctctaagtcttttgccccaaagatgaaaatagattcaaattaatgtattgtttaagattgtgaattcttgagctggaacacctgggtttaatcttgactctgctacttattggctgtgtgactacacaagttaacatcacctttctaagcctcattttcctgaaggcaatgatacttcctatcctattgcgctgctgtgagattaattaaatgaatgcactaaaaacattagcattgtgtctggtagaaatatagtacacaataaatattttttattgttttaatttctagtaccttgaaatcagtgtttattatttcctccccttgacgtcactgagtattctgttgttttgtttttttgtttttttgttttttttctctttttggatggagtcttgctctgtttccaggctggagtgcagtggcatcatcttggctcactgcaacctctgcttcctgagttcaagtgattctcctgcctcagcctcccgaatagctgggatgacaggcacgtgccaccacgcccagccaatttttgtatttttagtagagatggggtttcaccatgttggccaagatagtctgttgttttaaagcttaaagcaaaaagacttaaagtcaagtctttttgttcaagatgtacctgaacacccaacctggcgacagagcaagactccatctcataaaaaaaaaaaaaaaaaaaaaaaagatgtacctgaacacattttttgctatgatcaacattcaacataaggatatcgacagaatcaaaacagcttgccaagtatatttctttgcactcacatggcaatttgcactctcctggaaaaataaggaatgcccaacagaaacttgaaaggatctcatctgtggcacaaggcaggagagtttcatgcaaccacttcttcaggtgaatgatttcattagcaatgtttgataatgctcaatgaataagcgtaaagtatgttaaaacttaatcattcgtttgtattctggtgcatctggaccagaccaacctgactgtggttgtggtatgaggatgtaatctgttgttaagttagcattatcatttttttaaatttaatttaatttttatttattttttccagcatgcctctcccacgtggaaagaccaaatagtgagtggagattcacagtgtaaacttttttccaggaagcaatgcacaaacttaacaggaaaccataaagaaactacaggccctttgaaagaagtggcaggctgcagcctatactatgagccaagtgaaaaactttaggtccccagagtgtgagagtggcagagactgcctccaggatacattaaaacatccccactggggaacctggtaatccagcccatgggggaaggccttaaacctacgcagggactgatataggcagtcatggggaatataaaagtaggagcagcggccgggcgtggtggctcacgcctgtaatcccagcactttgggaggctgagatgggcagatcacgaggtcaggagttcgagaccagcctggccaatatgggaaaccccgtctttactaaaaatacaaaaattagctgggcatggtgatgcacgcctgtagtcccagctactcagcaggctgaggcagaagaatcgcttgaacccaggaggcagaggttgcagtgcgcaaaggttgcgccactccagcctgggtgagaaagcaaaactccgtctcaaaaaaaaaaaaaaaaaaaaagtagcagcagcagctagaagagacttgcacacatctgcagtctccagtgtgggctgagggaactcattcctgattttatgtcacaggggacctcgtggatgtctgccaactaactcaggcagtggtggcaggttcaaagaagctcccattgaaattcatgatattatctcaagtaagaaaaaacttccttggccagaaccagcatgcgagcgggaagtgtgctgcagccacaggcacagaaactaggcgcccagctttgcaagtagaaggggaggggcatatcctgaaagctgaggttcctgtctccaagaggaaggcttatggcttggggcacttttgaattctagagtagatgagagtagactgcctagaatttagctagttgctgctagaaaacactgtgggtgagattcctgccttgccaagtgcatgaaagctgggtgaggcttactgccacctgctactccacaacccccgcacaaactcttctgtgcagcagaagcagttatactctttccaggaaaagtatcacagtggccagaaaactgcctccccatgcacacagatcccaacagggtcttctggttaccttgcaagtgtagagccagagttcagacctgcctgactcagcatccacctggctttgccactccaaccaccttagtagcttaacacaaaagatggaaacttttgggagctctatatccccatccattgcctgacaaactagagtgcctccactggataacagaaggaaagcactaatcccactgctactactacagctgatgcatgacctcagctatcaccattgtttgaggctaaccaggaggtcctgagtctgttcatgtgaccagttcattactactacaactggcatttgagaaagccaccatgctaaggctatctataaccaaggaatctcacagaatctatgtcgctctcctgccatcccaatcagagtgggtgctggtacttgctgctaggagacttggggacaggacacatacatatcactggatcccttatagacattccccagctccaggctggagtgtggcagccccactatgcagctagacccagaggagtagtagcattcacagtagtttggctctcagggacttctattcctaaggaaaggagtagtgcaccatatcaagggtacaatccaagggtcaaaagaatccagtcagtaggactcaagccccagatctttccactggttagaagttttcttcagcagaggcacagttgctgtgctgggctcagcagggaaaggctgcagctctagctcaacagacaggcagacctggtactcatgaaaggtcttggaccttttttccctgctttttccccctcatccaccactgcagaaacaactggtgcttctactacagaagctcagcgtgtgtgtacctataggcagcctttctggaacactgccttcccacagatggagtattctccaggttccagcttacagaagagatacaaacataattcctctctacttggaacatcaacactcctgcagataaaaaaaggtacctatatgacctgaatagccaaacactgggtcaagagtatgtctgggaggaggatctatttcctgctggcctgacagaggagctgaggtgactcccacctttccccatcataagacttcagtgggattccctgcgagctcccctagccacttttgtcaaggctgggaccctctccccaccattgggtattgcgtgtacccaccggagttagccacaaccagtttcttcctagggacacctcccctattggcccaaaatctgaactattcaacccagtaaataaaatactagggaaaatataagtaaaaagtgcacttcataggggaatgagataagcttcaagacacttctgccattccaacccaatagtagacagtgaacttgctcacacaccaagtatatttctacaaccagtatctgagaaaacagtcatagaaagactctctataaccaagaatatcatacaaagtcttcatccttgaaagcaccaagagccaaattaagctataataaactataaacattaaagtcacacttttagagagaaaataaattttttaaaaaaccacacagtcaaataaaaaataaattcaagaataattaaaagaaagaacccacacaaatgaaaagagacaagaaaaataattctggtaatatgaccaaacagggttctatgacactcccaaaatatcacattagctttcagcaatggatccaaactaagggctaatctttgaaatacaagataaagaatccagaaggtagattattaagttactcaaggagatacaagagaaaggtgaaaactaacataatttttttaaaatcagaatatgaatgaaaaattttctaaagagatcgacattataaataaaaaccaattagaacttctggaaatgaaagatacacttaggaaattacaaaatgcagtggaaagttttaaaaatagacttgaacaagtagatgaatttcagagctcgaggacaaggatttcaaattaacccaatgatacacacacacaaaaaaaagaataaaaaaaattaactggccaggcgcggtggctcatgcatgtaatcccagcagtttgggaggctgaggcgggcagatcatgaggtcaggagttcaagaccagcctggccagcatagtgaaactctatctctactaaaaatacaaataaacttagcctggagtggtggcagacacccgtcatcccagctacttgggaggtggaggcaggagaatcacttgaacacgggaggtggaggttgcagtgagcggagtttgcaccaccgcactccagcccgggtaatagtgcgagactctgtctcaaaaaaaaaaaaaaaaaaaaaaaaaagaaggaaaagtaaattaactaagtctccaagaaatatgggatcatgtaaaatggccagacctaagaataactggttgttcctgagggagaagggaaagtaaaaagtttgaaaaacttatttgggggaacgattgaggaaaattttccttgccttgctagaaatttagatatccaaatacaagaaacacaaagaactcctgagagatttgcacaaaagggacttcaccaagtcatatagtcatcaggctatctaaaggcaacatgaaggaaagaattatgagagcaatgagacagaagcacaaggtaacttatgaagaaaaatctatcagactaagacacttctcaccagaattataagccagaagagactggagtcctatctttagcttccttaaataaaataactgtcagccaagaattttgtattcagcaaaaatacgtttcataaatgaaggagaaataaagtcattttcagagaaaaaaaaatgctgatggaatttttttgctaccagacactaccagccctccaagaaatgctaaaaagagttctaaatcctgaaacaaaaggttgattggcaccagaatagaacctcttaatataataaaacttacagagcctataaaaccataacaatgtaaaaacaaagtatctaggtaacaacatgatgactggaacaatacctcacgtctaaatattaacattgattgtaaatggcctaaatattccacttaaaagatacagattgtcagaatggataaaaaaatcaaatatctgctgtcttaagatagttacctaagatgtaaggattcaaataaactcaagtaaaggagtggaaaaagatattccacacaaatggaaaccaaaagtgagcaggaatagctagtaactttgaaacaacaacactaaaaaaaaaaaaaaaaggacaaagaatgtcattatataataatataaggatcaatccagtaagatgatattacaatcataaatgtatatgcatttagtactggagctcccagattcataaaacatttactactagacccaaaaaatgagatagataccaacagaataatagtggggtgcttcaatactccactgacagcactagaagatcatcgagacagaaagtcaacaaagaaaacatggacttaaactacaatctagaacaaactaaacctaaagctagaagaataaaagaaatgaaaaagatcagagcagagctaaatgaaattgaaacaaaaaaaaacaaaacatgaatgaaacaaatagctggttctttgaaaagatatgcaaaattgatagaccattagttgtattagccaactaaagaagacagaggacaattagaaatgaaactggagacattacaactgacattacagaaataaaaagatcatttgatacgactgtgagcacctcagtgcacataaactagaaaatctagaggaaatgggtaaatttctggaaccatacaaccctcctagattaaaccaggaagaaatagataccttgaacacactaataacaagcaatgaaattgaattagtaaaaaaatgccaacaaaaaaaagcccagggacagagggattcatagctgatgcttccagactttgaaagaacaactggtgccaattacactgacattattccaaaagactgagaaaaagagaatcctctttaacttattctatgaaccattatcaccctgataccaaaatcaggaaaggatgttttaaaaaaagaaaacaacagaccaatatccctgatgaacacagatgcaaaaatcctcaacaaaataccacctaactcaatcccatagcacatcaaaatgattataatacactataatcaaaagagtttcactccaggaattcaggaatgttttatcacactcaagtaaataaacgtgatatagcacacaacaagaattataatcatttcaatagatgaagaaaaagcattcaatgaaatccagcatccctttatgataaaaacacttgataaactaggcatagaaggaacttacctcaaaataataaaagccatttgtgataaagccacagccggcatcacaatgaatggggagaagttgaaggcattccccctgagaacaggaacaagacaatgatgcccaattccaccagttctattcaacgtagtactggaagtcctacccagaacaatcaggcaagaaaaacaaataaaagacatccaaattggaaaagaggaggtcaaagtattgctgtgtgctgatgatatgatcatacacctaggaaaccctacggacttctccaaaagactcctagatttgataaacaaattcagtaaagtgtcaggttacaaaccaatgtacacaaattagtagcatggctatacaccaataaacacaaaactgagaattaaattaagaactcaatcccttttacaacagctacaaaaacaacaaaaaaaaccctaagattatacttaaccaaggaagtgaaatatctcaacaaagaactatgaaacactgctaaaagaaatcataagtgacaaacaaataggaacacatcccatgctcacggattggaataatcaatatcatgaaaatgaccatgttgcccaaagcaatctatagattcaatgcaattactatcaaaaataccaacatcattttttacagaattaaaaaaaatcctaaaattcatagggaaccaaaaaaagagcccaaatacccaaagcaatcctaagcaaaaagaacaaatctggattaccagattttaaattatactataaggctatagtttcaaaacagaatggtactggtataaaagcaggcacaaagaccaatggaatagaatagagaacacagaaataaaaccaaatacttaagaccaactgacctttgacaaagcatacaaaaacataaactagggaaagaacaccctatttaataaatggtgctgggaaaactagctagccacatgtagaagaatgaaactggatctttatctctcaccttatacgaaaatcaactgaagattggtcaaagacttattctaaaacctgaaaccataaaaattctggaggataacctaggaaaaactcttctgaacatcggcctaggcaaaaattaatgacgaaggccccaaaatcaaatgtaacaaaaatgaaaataaataaatgggaaattattacaccaaaaaagcatccgtagagcaaaaataataatcatcagagtaaactgacaacccacaggatggaagaaaatatttgaaaaatatgcatccaaccaaggactgatatccacaatccacaaggaactcaaactaatcagcaagaagaaaacaaataatcccactcaaaagtgggcaaatgacataaacagacatttctcaaaagaagatatataaatggcaaacagacatatgaaacaatgctcaatatcactgcaaaatgcaaattaaaactgccaataagatatcatcttactcctacaagatgggccattattagcaagtcaaaaaacaatagatggtggcatggatgtggtgaaaggaggacacttaaacacttctgatgggaatgtaaattagtgcaacttctttggaaaatggtttggagatagcttaaagaactaaaagtagatctaccatttgattcagcaatcccgctactgagtatctacccaaaagagaagaagtcattatatcaaaccatacctgcatgtattatggtggtgcaaagcacaattcacaattgcagaatagaactcactggaaaattcagaatcaacataagtgcccattgaccaatgagtggataaagaatatgaggtacatatactacaaggagtactactcagctgtaaattagaatgaaataatgtcttttgcagcaaattggatagagctggaggctataattctaagtgaagtaactcacgaatggaaaaccaaatatcatatgttctcacttacaagtggtagctaagctacgggtacacaaaggcatacagagtgatataaaagactatggagggccgggtgtggtggctcatgcttgtaataccagtactttgggaggccgaggcaggcagattacttgaggccaggagttcgagaccagcctggccaacatggtgaaaccctgtctctactaaaaatacaaaaaattagctgggcatcgtggctggcacctgtaatccctgctactcgtgagggtgaggcaggagaattgcttgaaccctggaggcagaggttgcagtgagccgagattgtaccattgcactccagcctgggcaataagagtgaaactccgtctcaaaaaaaaaaagactatgaagacccagaagggagagggtgagtatgagtatggggcacaagggataagaaactgcatattaggtacaatgtacattactcgagtgatagttgcactaaaatctcagacttcaccactatacaattcatccatgcaacaaaaaaacactagtattccaaaaggcattgaaataaacaaaattttaaagaagcattgtcagacttacatgtattcaatatatgatatttctaaaaaccctgccaccattgtcttttctttccaaataggctcttggtcctcataagcccttgagcaaacattgtaggccactatctaatttccttatataggaaaccccaaaaagacgaggcttctccctcactactttacattatttcatcacaaactataaggtatatcaagagaaatgtatattttgggggcattatttatgacttttctactctgtgttagatggtgattcagccattgcgggtgggaagaggaatgatccatatttgaggatattagaaaatttcacaggagattgtctgaatttattaagtcaacattttcagaccacccttagtactactgacatttgtctgcttcctgcctatataacatgcatggctatctaaactctcaaataccctactacctggctagtttaagaggcaagcactagcagacttgtttactttgtttagattgcagctgctgtcgccctaatgtaaaggtaatgccatgaccccaagtatctaggatactctcactggaaaagctctgcaaagacttcattggcatacttaaaaggctggataagggagaaattttgtttgtttgttttggaagtatgtgcacaggcaaggtctgctttaattcctctctgctgcataaagtgctgtacatctttgacagccctcaaataaacaacatgaggaaatagaatagaactcactggaaaattcaggcccttgttcagctcacccctttaaccacatgtctctccaccctaccagacacgtaggagcctcagcactctggggaatctgattgactttctcaaggctgaatctcaatactcatgcactatcatccacttaacctccttattgcttctcagggtccacatgcccattctattattaataacaatctatataaactctatttgcaagtacagataaagtagtgacaatggtgacaatggcatagtctagtggatgagaataaaagatgcagtcaaagactggttaaaagatcttgctctctttttcactagctgtgagaccttaggaatattaattttattttctaaggctcaggtttatcatctagaaaatgatgaggaataattgtaactacaccatagggcttattttaacattaaatgagataatgcacataaaacagtgcagagtatggcaacagtgaattctcaacaagagtatgtagtgtaattagaagttacagcctagtgtaccagaaggagataaactcttctagatttgatacctagtcaaatgttttattacattttccacatctactatattagaatgatcaagcccacatcttaagattgttagctgatgtgcacaagattgaaactggacccacttcttacaccatacacaaaatgcaactgaaattagattaaagacttaaatgtaaaacctaaaactataaaaacctggaagataacctaggagatactattctggacaagggacctggcaagcatcataacaaagatgctgaaagcaactgccacaacaaacaaattgacaaatgagacctaattaaactaaagagcttccatacattaaaagaatctattaacagaataaacagacaacctacacaattggagaaaatatttgcaaactatgcatccaacaaaggtctaatattcagaatctataaggagcttaaacaaatcaagaagcaaaaaccaaacaaccctgttaaaaagtgggcaaaggacatgaacagacacttttcaaaagaaaacacacacgcggcagacaatcacataaaaaaatgctaatcactaatcattagagaaatgcaaatcaaaaccacaatgaaacaccatctcacaccagtcagaatagctatcattacgaagtcaaaaactaacagatgctggtgaggttgcagagaaaagggaacacttacacactgctgttgggaatgtaaattagttcagccattgtgggcagcagtttggcaatttctcaaagaactcaaagcagaattaccattcaacctagcaatcccataattgcatatatattccaaggaatataaatcattctaccataaaggcacatgaacacatatgttcatcatagcactattcacaatagtaaagacatggaatcaacctaagtgcccatcaacagtatactggattaagaaaatgtggtacatatacaccatggaatcctatgcagccataaaaatagagattttgttatttgcagcaacatagatggagctggaggccattatcctaagcaaactatgcagtataccatggaatactatgcagtcataaaaatagagttcttgttatttgcggcaacatggatggagctggaggtcattatcctaagcaaactaacacagaaacagaaaaccaaataactcatgtccttatttataagtaagagctaaacattgagtacatatggatacaaagaagggaatactagacactagggcttacctgagagtagatggagggaggaaggtgaggatcaaaagctacttatcagggccaggcacagtggctcacgcctataatcccagcactttggaaaactgaggtgggcagatcatttgaggtcaagagttcaagaccagcctggccaacatggtgaaaccctatctctactaaaaacacaagaattagccaggcattgtggcatgctcctgtagtaccagctacttgggaggctgaggcaggagaaccgcttaaacccaggaggcagagattgctgtgagccaaggtcacattgcactccagcctgggcaatagagtgagactctgtctcaaaaaacaaacaaacaagcaaacaaacaaacctacctatcaggtacaatatgtattaccttggtgacaaaatagtctgtataccaaacccctgtaacataaaatttacatatataactaaccttctcatgtaccccagaacctagaataaaagttaaaaaaaattgttatttgaaacatttagtctgacacccaagaatcataaaattcgtagggttggggatggaaaaaataagccatacttaagtatttttctttggccataacttttaaatacgatttacattatctttccaaaggtataatttatcttaccttgtggtaaccctggaattagagtcctcatttatcttatcttgtggtacccctaaaattagagtcctcatagtaaaattatccctccatgttcaatagctaaacatgcaaattgttctttggattgcaagagagctgtgaattagtactaagtcctcagccagagaaacttaacagagacttccattgggaacagaggctgctgataaaacttctctatgtgttcttcttaactgagttggcagtttaattgattccaaaatcaattttcaattagtggcagattggcatttcatattagctgttaaaattgtgaataatggtgaaaaagaaaagcttgtgacttagtaatcagttttacctatatcaaaaacacaatggcagctaaaagtttaacagagactctgtgatccttcaaatgatgcaaggtttgaagagacacaagggaagggattagattcacttacaggtgacatggatgctgtcagctggcagccctgataatcattgattctttccttgccttcattatcttccatttctcagtattggaatccataatataagtagtctcttgtttttaccctaaataaccttgaggaaaagaaggaaaaaggactgaataattcacgaggaagaaaactagttctaggtttgcgagatatgccagggtaggttaaactttcaaaatttccttcccaccctgggcctttgtattagaaaatatttctcccaatacatgcttctaactgagagtaaagatatacctctctttccaaaaagagtcacccttgttcacatattcatgcaccagagttttttcaatcttagccattctgaatacctcctaacagtgttgtggtttgtgtgctaggtctgaatcagtcgtccttcagaccagggggagcacagagagtctatagccaagattatgaaaactgttttcatggcatctttattcaggtttagtactaaatagctgattaaaaaaaaagtactaaaaactttactaacattagaaatatgcgtgtgtgtgtgtgtgtgtgtgtgtgtgtgtgtgtgtgtgtgcatgtctgtatgcacacgacccttgggtagaaggattacaggaaattgtttcttattttttaacacgctctttcttgcctttttctgctcatccaagcaaatacagttgtgactggggtaaacaaaaatccatttcacaaaatgctggggtcattaggcacaagcttaagtaaacaaagacacagttgtgttttagaaagggtagttaattaattataatatgttacaaagaaagcaccatacagtgtcttgcatttaataggggataatcattgtgaaggaatgaataaataagtggatgaaataagcgaatgaatgaaagtgatctttttttatatatactttaagttctagggtacatgtgcacagcatgcaggtttgttacacaggtttacatgtgccatgttggtttgctgaacccattaactcgtcatttacattaggtatttctcctaatgctatccctcccccagtcccccaccccacgacaggccccagtgtgtgatgttccccaccctgtgtctgaatgttctcattgttcaattcccacctatgagtgagaacatgtagtgtttggttttctgtccttatgatagtttgctcagaatgatggtttccagcttcatccatgtccctgcaaaggacatgaactcatccttttttatggctgcatagtattccacggtatatatgtgccacattttcttaatccagtctatcactgatggacatttgggttggttccaagtttttgctattgtgaatagtgctgcaataaacatacgtgtgcatgtgtctttatagtagcatgatttataatcctttgggtatatacctagtaaggggatggctgggtcaaatggtatttctagttctagatccttgaggaatcgctacactgtcttctacaatgaactactttacactcccaccaacagtgtaaaagtgttcctatttctccacatcctctccagcatctgttgtttcctaactttttaatgatcaccattctaactggtgtgagatggtatctcattgtggttttgatttgcatttctctgatgacgagtgatgttgagcattttttcatgtgtctattggctgcataaatgtcttcttttgagaagcgtctgttcataagaatgattggatccaggcgtctatcatagagtcacagattgttttgcataaataaacatataaagacattgtgtttcccacttctgatggtgagcactgatactgatacgtagccctccctgtcaatattcatggactagttggctaccatacttatgcatattccaactgcaagcagaacagtatgaacatttctataaggccatatcaaacaaactcacactcactaacttcaagaaaagctgtgtgtttgatagcttatggtctataagtggtaatatacttttgccaactatgcatactgctaaactcagaattgacagtagatggaatatgtagaaactaatgtatattttgttgaaattttatgccaatctattcatttgtgaatagatgatagatagatagatagatagatagatagatagatagatagatagatagggtcaggcacggtggctcatgtctgtaatcccaacactttgggaggctgaggcaggcggatcatgaggtcaggagttcgagaccagcctggccaacatggtgaaaccccatctctactaaagatgtaaaaaaaattagccaggcatggtggcacgtgcctgtaatcacagctacttgggaggcttgagacaggagaatagcttaaacctgggaggcagaggttgcagtgagccgagatcgcgccattgcactccagcctaggtgacaagggcgagactccatctaaaaaaaaaaaaaaaaaaaaaaacctagatagatagatagatacagatatttgtttcctgacacacttgtcaccatggttttaaaatttcatttctcatcacaaagactaacactatacaaaccaaaagctattgagttaaataagagaaaatcaggaggctggtaatatcaatcagaggttttgcctggggcaatgctattttatgccattctctaatttgtttagtaaacatatttacaaatgtctaaactactaatgtgatggctaatggagaagaatctcaggagatatattaaactgtaaagtaaaatcatagtctcatctttaatgtcatctgcaaatggctttaatgtcatgagattgtatctatatggcacaagaggaaaacagtcttgtgaatttacatacccatatttagtatgttgcctgaccacagcactttgctgtgccattgctagaaacaatacatagttttatacagtttcagcgttgctgaaagatcccatatcataagacccactatgataaaacataataggaagcctggtgctttcaacattttaattttaattgtcacgaaattatgcaaattaagaatcagtatactcatatattttcagaggagaaaacggattgagagagttccatcggcttgcctgtggtggcaggttgctcattagcatagccagcagtcaagcagcagccagacacagtagtcgtggattcttcttttctttcatacttttgttcctatgccatacagaccttactatgaaaagaagttatgctggcccctttggggaaacatagaatgactattaatactatttggattccaactgtgaaattgttacaccacatctttgaatgggaacctagagacctaacagcagaattcccaaagagagactttctgcccagtagctactttcagtgttattctgtttatttaggaaaggcatttctcagtatatacgctgactgtttttctatgtgaagacacttaacaaggaaataatggccccatgggtgaaaatcataatatgaaataccccagggcatgtgaatttttattacattaaattaaaaacataccatctactacaatcccccggtaaacaaacaaaaagaagcaagcaagaaaaatgctatgcaaatatttttattaagaaaatagcttttataggttctataatgttcacaaaattaataaaagtttattgtataaatttgcataataaagaaaaaacacaaaattgcatgaagttcacccaaaacactagctggaaataagcattgttttaatttttataatgccttcaaacaatttttcaaaaacctgggagtatattctatgccactctgtagttttttaaatcaatgataaaaattgagaatttttcctttcattacatattcatctaaagaattatttctaatatctgactatgaatatattacatgagtaatgcaatttaaccagttctatattgttagtcccttggtgattttcaatgtcttattaaattaatactgtgataaataactttccataaaaatgttagaagaggaattattcttcaaaacggtgtaagtgcagtccttgggtgtaggtggagtattagctccaggactgaccctcggataccaaattccatggatgctctagtctcttatataaaatggcttagtatttgcatataatttatgtacatcctctgtatactttaaattaaactatctctagattacctgtaatacttaatacaatgtgaatatgtaagtcattgttatgctgtatttttgtttgtattttttgttgctgtagctattccttattggtttttttttttttcaggaaaatatttgatctgaagttggttgaatcagaagacgccaaaccggcagatatggaggaccaacagtgtaaaatagtgactcatgttatcagattcataatgccttcctgaccagctgaaacttcctaaccagccctaattattttcattaaaaatatatcacttttgaaaaagtaacagctgagaaatactaccgtcataatactttatatttacttgacattgagtttgattcatatatatatatatatatatatatatatatacacatacatacatacatatatttctgtgtatactcatgtattttgtgggccagtttttatttcttttttgaaaatttcctttcatttttatattttttctaataggtatgcttaattgtttatgttggtttcaagaaccctttcatataggattaatgcttcctgatgatcattatactgttaagtattttttccacctattatttttttccattttatttggcttttgactacataatttttatgtactaatacatggttttctcccttgcttcaaattttaaaaactcttctttactattatacacatacacacatgaagggatactcagacaagtggaaaaatattgaaatatgttagtgtccaacttataaatattttataattattttgaaattcagtcagaaataacgtgtgagatagaaattatgttatttctcacatattttcatatttgtaactgagaaaatgcataatacatatggtagctatgaaatattactattattaggtaaaatttgaagttttttttcctctttttctggtacattcatttgtcactctatttttctaataactaaattttaaatttgattttttttgttatatgtttcagtatcttaaaaaggaagcaactgctccctaccttataatttctctatatcagagcatttaataattttcgccagttaattcatccaaatcaactatataaaaactaaacctgaggtttaaaggtccacttgggatttttattgtgattttattggagttgtacatttacttgaagagatataccatctttaaaatattgcatctttctatcgaatgttacagaatacttatttatgaaagaattgtttatgtcccttgataaaattgtatagatatttttagaattaacagacacttctgtgaagtttgtctataggaatttaatagctttgtagctagccactcattcattgcacaagtatttgttgattccctgcaccatgataagcagttgcaaaaaaaaatgatgacgaaagaatggggaatattcaaaaattgatagatagatttaaagtcattgtaggttttaaaaattgcttcaaaggaaataacagagtgctgtgataagacaaggaagaacccccagggaaattaagactgaaaggaaggcagaggtcagattgcaaagggcctgaaagcaatgctgagggttttgatatttattctaatatcagagggaatgcattctgattttccaagataatttataaatataaaaatgtgctctgtgttaattatgaacaagtatataaaataaaaattaaactctcaatgctttcttccactatctgactactcaagttctaaatgagggtatattagcttttatcattttacccatttctagaacttttcttcactatggaacactaataatttactgagctataattattctcatcctctcaattagattgtaaattccaggaaggcagaggtgatactgttttgtttatccgccacatacttagctcaaggccttacttactaacacataatatggaaatatttattgtttcatgaaatgaaaaaatccttcctgacatgattattcttgacatgaatattaaataagagatacataaatgaatctgacagttgtactttctgtttatgaacatgtactggtctttacaggtgaaaaatgcagaataaatgaaactggcaaaaatatgtaaaaattagaatattttctgatgacttaaatgtaaatagtttgggctacgatctttattgaatccatttcttagtctcccactcatctccttctatgtaatgtacaaaatgtgcatgtctttctcattaggattatacattgatgttaaggaatcagtttaatctttgcttcttcctttcaaatagaggtgctaagatgttgacatgtgcagaagaccagttatgatatttcctagtttgttcaccaaaataattcagtctacatccatttgttgcctatcaatgacagactggataaagaaaatgtagtatatatacaccccggaataccaggcagccataaacaagaacaagatcacgtcttttgtgggaacatggatggagctggaggctgttatccttagcaaactaacgcaggaacagaaaaccaaataccacatattctcagttacaagtgggagttaaataataacaacttatgaacacaaataaggagacaacagacactgcgatgtacttgagggtggagggtaggaggaggaaaaggagcagaaaagataagtatcaggtactgggcttaacacctgagtgatgaaatagcatgtacaacaaacccccatgacacgtttacctatgtaacaaaccttcacaggtacccccaaacctaaaataaaagttagaaaacaaaaaaaaaacttgccttgatttctgtcaggtttctaaattttctggatccagacaaagatatattaatttgttttatactcatttgttttcttctttaatgatatttattcaattgaaaagtgtgtactattattacctaaaaccattaaaatttagtgagaggttaagggaatgccataattaatgtttaatagttgtcagaatacaaaattattttaacagctttgttgaggtgtaattaacatacaataaactgcatactgaagatatataatttgataagtttcaatgtgcatacatactcatcataatcaccataataaatacattatatatatatgcatcactccaaaaagttttcacatgtccctttgtaatacctccctcttctcctcccctcaacaatcacgctactggtttgtgtctttttgtagaatttaaatacatgaaattgttcatgcagtgtgatactttttttaaatcttaaatcttttctcagaataattcttttgagactcattcgtgtagtggaatgtaccaaatgtattattttttattgtagagtggaatttattgtatgcatatatcataatgtgttttcatatttatctgttgatgaaaagttgacttgtttttaatttttgctatcacaagtaaaacttctgaacacatttgtgtatgagtctgtatgtaggcacatactttcattttatttggtactaacaccaaggagtagaataattggatcttatggtaggtttatatttaactttttagaaaactgccacattattttccaaagttgttgttttttttcacattctcaacaccaatgcatgaagagttccagttactctacatcctcattaatagttggtatggtcacatatttaaatttttgctctttttatagatcagtggtaatatctcatcagttttaatttgcatgtcacttataattaataatgttaagaatattttcatgtgcttatttgccatccatatatcttcctgggtattggttgtctgttttcttattattgtaaattttgagagtgtattatatattcagaatacacatccattatcaaatatgtgattaacaagtattttctccaagtctagggtttgtattttcattctcttaacagtgtctttgaaataccaaaagttattaattttgatgaagtctgatttaccaatactttatttagtagatcatgctttggtgtcatatctaagatacctgaataatatcgaattatctgactgatgaaaattatatgtctctctttactaagatattttgtaaaaatttctctcagcaatattttatcgtttttcagtctaaaagtcttccatttgttttgccagatttatctcaaatatttcatatattttaattcttttaatgaatatcaattaaatatcaacatctgattacccattattagtatacagaagcacaactgattttacgtattgcccttgtattctgaaattctgctaaactctcattaccagcttttctgtagattccactggattttctatataaatcatcatgtatctgtgaataaagaccaaattatttattcttttaattacttattttcaatatggatgcagttaattttgttttcgtgcctgattgcactggctagcacttgtaatacactgttgaatagaattggtgagagtggacatccttgccttgttcttgatttaagggggaaaacaattatcatttaaaagaggctttcattattaaacatgatgttacctacagactttctttgaatgtcttttgtagtttgagaagtatcattctatttctagttttctaagaatttttgtcaggaatggatgttagaatttgtcaaatatattttctgcatctattgagattatcatgtgtctattttatttagtttgttaatatggtcaatattattgattaatttttaaataataaactaagttatgcatcattcctgcaataaattccacttggtcctggtattctattctttcatatattgttggattcactttgctaaaattttcttaagaatttctgtatgtgttcatgaaggatagtcatttatagttttcttttcgtaacatgtccttgtccaatttttgtaatagtgtaagactttcctgataacataagtttgcaaatattccttcgtcacacattttctggaagagtttgtttaaaattcatatagtattttcccgaaatgtttggtagaattcaccatgggagtcatcttggtctggtgttttttttgttattagaaggtttttttttttattttttttcactgcaaaagtaacttatttaacagatatagggttattaaagcaatctaattccatttgagtaaactatcatttactttggtagtttatgcattgcaatgcatgctcgttttgcctaaattgtcaattttattagcataacattattcataatgttatcctgttaatgtctttaaatctataatgtctcctttcatgttcctacagcagctaacttatactttctctcttattttttctgatcggtctggctctggaattttgtcaagtttgttgatatcatcaaataattaactttgatccattcattgttttttcttttttctcttttctgtttcatttgtttccacctcaagcttttgccccaaattcttatgtttcttttggtctgtatttgctctcactttctagttcttaaggagaaaaaagtgaagtcgctaatttcagacgtttcttctttattaggcatttatgtttatatattgtctaataaatatggctatagttacatcccacagattttgaaaatatgcacttttttctccatttttcttcagttcagaatatgttctaatttcccctttgtatagtttcttgactcataagtttttgaaagttttttttttttttgtttctaattacttgggtgttttcaaaatatctttttgtttgtgatttcaaattaaattctaccatgtctgagatcatactttgtaagctgaattttttttataatttttaagatgcatttgatgtcacagaacacgggttggcaaactatgacctgcagggcaaatatggccttgggcttctttttgtgtggctgataagctaagagcgatttttacatttttaaaggattgcaaaaacaaacaaagaacatgtgacagaaactacaaaggcctgaaaagcttaaaacactactaattgctttttgcagaaaaagtgtgctaacatctgtccttcgtaaatattacatgtacaactaaatgtgtatttttatgtttgggatacagtggtccatcaagtctctgaagtcaacttggtgttgatagtgtggctcagttctttcttacccttactattttctcttgcttatttatcagttattgagaaagcaatgttaaaatctctgataataattttgaattttatttccccttgcaactgtctcatttttttgcttcaaatattttgaagttcaataattcactgcattagtgtttataatgattgtgtccttttgatgcattgaacactttattctttattaactaacctttttatctctgataatatttctggtactgacatatgctttgtctaatattaatatagctacttcagtttttactgactaatcttagtatactttttttttttttttttttttgagacagtctcgctctgtcacccaggctggagtgcagtggcaggatcctggctcactgcaagctccgcctcccaggttcaagccattctcctgcctcagcctccggagtagctgggactacaggtgcccgccagcatgcccagctaatttttttttttgtatttttaatagagacggggttttaccgtgttagccaggatggtctcgatctcttgacctcgtgatccgcccgcctcggcctcccaaagtgcagggatcatagacgtgagccaccgtgccaggctcatttttttcatttttttaaaacaaaccaatgtttttacatataaactgtttattgtaagcattatatagtcgggtcttgcttttttgtaaaatcctatctgatgatctcttttagctggaaaattaaaatcatttatatttaatatgattgtttatatggaccaacatccacaagccaagtatgtgcttaattgcagttcccaaaaagcagcatcagagggagatctggtaatatattttgaacagttatctaaaaatattttaaattttataaaactatgaaaccccaaattgaagaagcaacagaaagaccaagagaaagaaacatgataaaaatgatgccaattcacatcatattaaaattgattaaaagctgataaaagggaaaatcttaaaagtagccagaaagaaaaagacacattatctacagagtaacaaaataagtattttgttcaataaagaaataatgcacaataaaagaaaatagaacatttaaaaaactatatttattttaaaaagacaaaatagtgatgcttttgtatatacaaaagcaaattgttaccaacaaaaattctctgtaaagtatattcaaggaacttctgcaaagagaagaaatataatgccagatgaaaatttcatatacatttggctttttgaatttggctaataattcaaagatgttttatgttttcaaaatgtttttctcttgctgtttaattttggatagcgtctgttggtatgtattcaagttcactaatcttttcttctgcaatgtctaatctgtcattgatctcatatacagtatttttttatctcagaaattctcgattttgtctctataattttgtttggggtctttttcatatcttctatatttctactaaaatttttttagtctttgttcttctagctctttggacacattacatattgctaaaataactacaaatatccatgccttttaattctgtcatctgtcactagtgattggctagtgagtagattctccttcttataggttctattttactgcttcgttgcatgcgtttttgttcatttttttaatcatatggcagacaatgtatattttacataatcagctgttgcatatttgtatgttcctaaaaatattcttgaaagtagtttgatcctttcctttcttcttaagctttgctaaagggggccagaggagtatttagtggaggattaattttatcgcagaacaggagaaaggcctttcttaatattctaacttgtgtccaatgaattaagaggtttctactctgctcataggaaatgggcactagttgagctctatgtgagctttagacactgtttctgctaatcctttcaagtagttatttcccatgtcttaagaagtttcctcagatgcatgcactgatcagaacccaagtgaatacttgagagggttcctctggaggtaaacatctctttttagccttttcttatctaatatatgttctgctgtgatgcatgtttcaagtaatttaatattagagatcaaaactttcctttagtaaagacaacatctagtcacatgtcaaattccataaggactaatgaacatctggaaagaggaaacattgtaaaaatatccatgggtcaataatatatgtgatgtaatactcaaaaagcaaccaactgcaccaaggacaatttaaaaaataagaacacaattctgtaaaaattacgaagacttgtttttaggaaaaataattaatcaacagagtcaagatagttaaatagtagaatgtgtaatttgtttgttttgtgttttattttaaggcaactcttcattaagtaaaggcatgggggggatgcttgaaggtaaaaatatttgaagaggttaggatggggatattcaagctgcacagctactttttatttagcatcatgtcgatcattcaggagtatgaaaaatttcaaaagacattcacagaaagcctagccatctctagtcttttgaataatactcagtgttaccctcaataattattaaagacattgtatggaacagtgtatattttccttgatatacaataataacaataacaaaagaaaatgtcaacagattgtgaaagtataaattaggacaactactttgaaataaacattttggcggtatgtaattgaaacaagtattcatactttgatctggcaattctcagtctgagaatgtttcctgatgaaataaatggaaatgaagaaaaatatttatgccaaacattatgcttattgtagcaacattattttttaattgtaaaagttcaaagacaactctttcttccaagaaatggcaacagttaaattcattgacttgtccagtcatttgagtataatacaataattgaaatatttacaaaggccatgtagtaactttgagaacacttacaaaataaagttgaaaaggattatacatagtaaattataatttataatgaaaaaatgctcataagaaagatctaccaagtcaacgtattaataatatacatctttggaggaggatggaaggatagaaagcaaaacaatagctatggagtgggaaatggaatctaaaggagtcaatatatcttatctctaactcatagtgttcatacttgagtaaggtacatgaagtcacttttcctcaactttctcaactttgtaaaatgggggataatatcaattttaggattattgttttcataaatgaattaacacatacaaaacatttagaatattgttcaaaataaattaaacattctttaaatactagctataaaatggataatggagtatctacatttgtatattatatttttaaatattttaactagtaatgtttttataatggaatcacaaaaataaataaccagcagagactcacttgtcaaaaattcttccatttattttctattttcaaatcagtgggtgtgaaggaatagctacagcatttcgttttccaaatttagctccaatggaaagaggatttacaaattttatgctcaacttgacagattgctgaatgcttcctttctctactcaggtgatgtgcttactttttccaccagcaattgctatattaccaagcaaaacggaatcacacttttatagattgggttaagccaattattgattttcctggtttacaaacatcaaaacaaccttgaaaaagtatgaaaattaagttcaaattgcttaggttcagtatgttttcacaccacaacgtgtagaatatttaataactctaaaagcgacttatgtaataaaaaggactataatccaaaagtatgtcttgcctaaaaatcctaaaacaagatgtatattttaatgaatagactagaagattgtgaaacttctagtttcacaaactagtcacaaagggacagcttattatgaaaaacaaaagatagtctttcaaatagcttcgatagggtgtccatcgatagggtgtccatttaactggaatgaactcttactgattagggtaagagttctcatagggtaagagtactgatagggacatcgatagggtgtccatttaactggaatgaactcttactgataagcacttcctcgacttcacttctgtttccattacttaatattatttctttgcaaccatcaatcatgttcacctgaaagtcctcaatttgtagggaggatattgttaagaattattttaagtgggaagaaaacacctgaaactcacttaaacaaaaaaaaaaattttattggcttagtttatatgtgataaaactacagaattagtttgatgccaggcacaactgaatccaggagctcaacaatccatcagtaatcaaaaatatattcttttgccaattttgcatttctaagtttttgctgcatctgtacacgtactaccttcatatggtcacaaattagttctcagtatctccatgttaacattcaatttgcttcaagtccagtgggccaaagcttatttttctaaatgcttggaactcaatcttattggctctgattgtttttgcttatatcacatgcctattgctaaataattactatgaacacgattctagggaatatactgaatggacagatttgagacactgtccaaccctgaagtttgaagacattcaacctatgtaaattacatgaacaaagaggagataagtgttgcttcccatgaaacttaaggtgctactagaaaaaagcattagtgaatgaaggagcatgctaaaatattaaaagtatttaggacactatagtaactaaattatatgtgcacactctctgtatctgtatctttattattctttctctagacaaataggtgtttaaatagatgatataaagtatatttgtatatagtgattgtactaaacttgttaaatcagtatacaagttgttttcttttttcctaccatttccttcacatatgaactgttgaatttatttatcctctctctctcaacattttgggaggatctcattactctagtccctttcgaatgtagtaatagtctcaattttaggttttaaagtacaatctaaactacatgaaatcgccactctatttttcatctattatagtgatttttacatccctgaactcagacctgatccttagcttgggtgcctgcagtaagaaaatgagctaagatttattgttaactcttagtccactagttctcacctcctgcttaggttccagtagagttggagagataagcagaggcaactgaaaaaagagaatcaaacccacttcttagttggcagatgttacttggccatcacaccttctgttagtctcactgttgacgcttcataagggcttggaggatcctttagagaccgcatgcccgttcataccgcatccttccttgatgagaggtgcactctccacttgatcccttttatccctcatctcaacaccctctgctctcacacactgggcctccccatctcttgcttctctatgctagtgttcttttaccctggcaagcaactctctttatgtactcttgaagggatctcacacatttactttctcagtgtctcctcagtctgtgggaaacattgtatatctctgccctgacaataggtcttggttgcttccttccactgctgtcctctctccttgccttactctgccatgtgtctactccagctagtcatctggcctcaggcttctcttggggagaagcagccacctaacctacctctctgaccccatattgctccacatctggaagacacatattactttgtcctaggatgttgctcactaagctgtgcttcattcccttagtgtcacaggggcaaacagtggtatgggtgtggaataagatgatgacttttgtttcctataaatactctcatctctgtgaatatttatttgggaaccctgtcagctggctaaaggtggtagtgggaaacaccttgcttcccatgggtactggagggaaaataagaaactctcacctcctagaaattctcctgctttaatgaattatccctgaaatatttttttcttttatattctggataaatgatgcgaccagtggttgcagggctgcttttattcttttctgtaaatctcatctaaatgtatctagcacacttatttataaatgggagggaactattcgtcattcattgtttttagctttggggcttcggagaaaactctgaaataacaggaaaagcacgttcacatcatgctacctttcacattcattaacacaagtaaaagacttaatttttttatggacttataatcacactttcaggcaggcattgttagccttttttttttttttttgataagacaatgagtcacatgaagataactgattcaaccaagtcctgtcactgggagaagggccaaagccttgatgttccccatttctaacctgtgttttcttttccattcaaatactttcaaaatctttcatgaatgaatttgttggtaaagtatgagtgataccagttctacatatatatatgtttattcctagcgacttatcctttgaaatagttgctgtctgcattgtgtgtgtaatgagtatgtgcctgcatgtgtttatacagctcattaactttgtgtgacttttgtttctactgctgggaaaactttccgtcaccataaacccaatatatgttgataggaatttcatgagaaaccactcacctattatgtaactaaaatttaaatataaccttaggtggttctatacttctaaattagaatttgttcatgaataatggtggcaaatgaagaacctgtgacagagtcctgagtcatatctggtctgtttagaggcaaagcagaaaactattctctttatcaagtggattgtgctttgctattctttgaaaggaagagcagctgggaacagctaccattcccaacataatatagagcagaaacccatcttaacccttcacctcagaaatctgtacatgatgtcgccaagtcagcagaggccgagctgacgaggcaagtcagccctctggcaggcttcagcatcagagcactacgagttgatgagagttcccaggggacagtctttgtttggaatggtggtggcaacactgctgtcatagcaaagatctcagtcacgggcacgtcaacagaccacagcttgcatgacattctgatattgctgtatatctataccacccatatccttcttccctgtagcagttaataggacaattgtcaagtagaagtgagggattctaaaaattttttttattattatctgaagcatccactacacacaagcggagaaatcaattactgcctgtgttttccactgggctttctatttgggcctgtactacaatttttattgcacttccctggtttccttttttttctcagtaatctttgcaactatcctacccaaggttcgttatcttctctgctggaaagtgatatggctctgtgggaaacactggaaaatataggacattaactgtgtcctctgaaccgtggacacatataaatattactttaagtgtattaataacaattagagtaagaggatgctcagtgttaggaaggaaagaaacataacagggatgctggcatgcatgtaatgtaagtttgggcagaaggaaggtcttataactctgtttctaagtcagtaatgaagaaaacactaggttgattgagtgtgggagaaaataagagataagctagaattcctgagagaatgaaagtaaagtgacctgccagagtaagctgatgcctcatgatgtgactctatcatgggtaccactaaggcttcgtgaagtacattggagagggagtttgagaaaaaccactggagcgcacatgagaattcattctgaggtccatactgtggagccaataaaacatattctttgtaaggaaatgttttacaaatgtttatgaaataagtctttgtaaaatgactgacaaaattccaaattgttcagtatatttgtgactatggaggcaacttgggggtggaatacagtaacatccatagctgtgatctcaaagccgtttggacacatcaatattattacattttttttcagcagacatctctaacatatatatgcatatatttataaatgatatagatgcattattaacctaccaaactaggtgtattataaaatgtacaaatagtacatgttatggaatgaaatataaatacttatatatacatatatgtacatgttatatatatattcattatgaattatgtatatatacatgtaatgtatatatatgtatacatattatgtatttttattttttcttccaatacatttctgtcatccctctcactccacttggaactccacaggataagttcccaccttaaatcctgagctgctggaatacgttctggacacctgcgacctttaacttaaataactgggtaaataattatcttacttgtttttattaatcttttgtccatcttaaatatatgccataggaccttagctcttgtttatatcaatgagcttattataaacttggttttgtcacacaatgtttaacttaaagtcacggtttccaggtccatacatgttgtagcaaaacaatgtacccttgtgatacacacactttgttttgcacttgttcccaatttcctttgtgataggactccaccaaaatatttagcaaagctaactgtaagctctttgggccatgactgaggagtgaggacttacaaagtctggataaatatggtcacaaggaaataaaaatctaactaatcaaaggaaagcaaaggtaaaggaggagagtaatatgtataatatctcatcttttatcaaaaatataacttctgtgaatgagtctttgggtgaaactgtcttcaaagagaatcttataagatgagacttcataaaagaagaatcccccaaacactgattgtgcagaaataatgtatatttcttgtaaaattttctagtgcattaactttattctttactattactctgaggatgctcaactcctgagtgttaatgctataaatcttcaacagcaagaaggaatatcagtcaataaatacttaacaacagtataaattatgtatgccagaataagtgagtattgcagggaagcacatagactaatgggcctgcttactgaatgccataaaactaaacatcctgaatctttacaaggagggctgcattacctaacaagtaattctttcaaaataatcatcctagattttgggagaaatttttcaaatgccagtggtgatgtctgtgaaaattatttagtaattgtaatctaaatattcttatgtacataatctataacatactcttaatcagaattgggtttgtaaagtgtaaagcaattggataaactgtagacagctcaatgagagtttatatctcattcactacttgaaatattggtactgacttttaccactgagattatactatatttgtcttttaatgcttagatccaaattactgaataaaggttactaattgtttcctacaagcttgatgtattagtggcttgtttgaatacccaaagaaatataaagattaacattataattaaataatggataatataggaagtaatgctatagactggtgttcagttatgcctatatagtatgtgtttatgtttcctctatatttgagtcctgagaaattataaactctaagcagaaatgttaatacctctgttcagtttccttatgcggaaaattctcacagactactctaaaaccacttagttatggtagtttcttagacagtctgtaatgcaaaagccagaaagaaataggtgtagaaaagaccagaaaataaaaaacaaaatgacataatgtccttaaactgacgtaccttccataatcaattttaaattgtcaaaacataaaacttgtttttgagggaaactaagttgggaaatctgattcattcctgtgggttgcatgcattgattttatttttacagatgattattcaacttctacttgactttggatgcttaaatgtaggcattatacgtacataactgaatgtatagcataaaataaagacagtgtttccaatttctctatgctctgtgccatcatttccctatatgttaacataatctcaatcaaatgaatcaaaaaaagagctcaaaaacctcaatagcaaagctactgacaaaagattttggcataaataggcaagtaaaataaatccaggttcttttcttttcttttcttttcttttcttttcttttcttttcttttcttttcttttgaggggggaacagtgtctcactctgtttcccaggctggagtgcagtggcatgaggacaactaactaaagcctcaaactactgggctcaggtgaccctcacacctcagcctccagagtagctaggactacaggcacgcacctccatgcctggctaggttttcatattttttgtagagatcaggcttcaccatgttgcccaggctggtctcaaactcctgggctcaagtgatccacccgctgtggcctcccaaagcgctgggattacacgcaggcttgagctgccgcgcctgacaacccacattcttttttttttttttaattgagacagagtctcactctgtcacccaggctggagtgcagtggcgtgatcttagctcactgcaacctccacctcctgggttcaaacaattctcctacctcagcctcccaagtagctgggattaaaggcacccaacaccacgcccagctatttttttattattatttttctattttcagtagaaacggggtttcatcatgttggccaggctaattttgaaagcctgacctcaagtgatacacctgcctcagcctcccaacatgctaggattagaggcgtgagccaccgcacctggccaatccaggttcttaataagtacaagagttagcattgtttgtgagtgcattttaattgctcacttcattcaagtttatgtccgtacccaattttgacacaagtcttgatagaagaccaataataatgtcaatacattccaggaattggccaactaccgcccaagggccaaatccagagcatagcttgttttggtaataaaatattattggagcacagccatgttcattagttgatgaactgtctgtagcagctttcattgtacaatggctgagttgagtagttgccacagagacaatatggtctgcaaagcctaaaatattgatttcttggaactctgtctgctgacccttgatatataccaatcaactcatagattattagggacaagaagaacttaagtggttatcctgccatacaacttcatttgaccaaagggaaaagtgaggctcaggaaggtgataatttgctcaatgatataaaaataatcagggacaatagcttggaatataaaccagttactacttcctgatgcattagtccttgtactctaacttacatggtagaaataaatcaggtttctcatataactgatttttttaagctttgtcagtataattagaaattacatgaaaacttttggaacaaattttcttacaaagtataacacagcatgggaatagaatatttaatatttagttacagtaattctctcagtctttttaaaacttttccccttgtcacacacacacacacacacacacacacacacacacacacacacacgtgcagttcaatgatttatcacaaagtccaccatcatacagcatgttgcggggacccaggagcttttctcatgctcctgtcattaaacctttcctttcctgaaaaggcagccccaggcctgatttttacattaattgtctccttgcatttctttggttttaccacataagtatggttctctaaacactattgttatacctgtttttaagttttatgtaaattaaattatacaacagtgttttgtgcctggcttctttacttacataattttggtgaaattcttgcattgtgttcatttgcactgctatatgcattcagttacatgaatatagaacaatttatatacatcgtattgtggaaaaatatacgggttatcatagtttggagatattatgcataatgctcccataaatacttatatccatgttttttggtacacatatgtatgcattttcattaggtagatactaaataattgattgagacttttggatctgtgggtttgcgtttattcaacactggcaaatagtatacaaataaatggtataaatatactctcgccaagcatggtggctcacacctacaatcccagcactttgggaggctgaagtggacagatcatctgaggtcagaagttcgagactagcctggacaacatggcaaaatcttgtctctactaaaaatgcaaaagttagctgggcgtggtggtgagcacctataatcccagctactagggaggctgaggcaggagatttgcttgaacccaggaggcggaggttgcagtgagcagagattgcaccactacacgccagcctgggccatagagtgaaactctgcgaaactctgtctcaaaaaaaaaaaaaattatatatatatatatatatatatatatatatatatatatatatatatatacactttcctcctaaaattgtaagggggttgtctttgctccatatcttcaccaacgcctgctattttctacttacttttagtttttctgataagtatatggtgatatttcattgtgccttttacttctaatactgtctttgctgaggaatttgaaaccttatatttactggccatttgtataccctcttctatgaaagacttttttcaaatatgtagttatttaaccatgaggttgcatttttccttgttatcagcagagaatcttttcatattctggaaacaatttttttgtggatatattagcacaaatatcttccattactctgtggaataccagctatgtcttctaatggcaactttttttcaaaagtaaaacttaacattttcaataaaatcaagttgactaatattttacttttgatatgggtgttttctaatcctatttaatagtatcctctcaatctaaggtattagatattcttttatattaacttctggatgcttaatttttatcctttcacaatttgatttgctgtagtctgaattttagatgcggtgtgaggtatgggtcaaatttatttttttcttatatggataccttattgttcagtagcatttattttaaagactgaccttcacaactgtctccataacttttgctgtatatcaagtgcctatatgtgcatgagtcttaattttgggtcatttattatcttattttcacttaacataatattggtaaatttatgtactttaattctgaataatgccttattgcctaatagctgcaattttataatagccttgatacctggtagagcaaatttttccaagttgttctttattcagatgtattttaactacctttaactcttctggtttctataaatttttaaatcatcttgtcataaagtgggccatgaacaagatggcaaagaaggaagctctgtgcccttttatccctacagacacatccaatcagcaacaattcatgcaaaaatttacattaatgaaatgagaaatcaattgaaacgctgcttcacctgaggagaatgtgaaagcagactcaacaaagctagtaggaagattcaggacctgctcctggatcagtgccatatgatcaggaagagatgtcccaacatgccagtttcactagaggaggggaggggaatgggaaaaagcattcaacttttccaagggacctccacagaggactgacttttttcttgccaatcctggagctctgatataatcagcatggtctagtcatcctggggagaacagcttgatagatgccctcatcctcttctctgccaacacacagtaaccagacaaataatcctggctctcagcttcccgctgaggtggggaaggatgtgacccatgcatccagcatcacaacttctccagggcttcccaaaggtagctagactatgcttatcagttttaaagctctgatgagtctcacataatctagctacctgagtagaaaacgtaacttaggctgatagatgccacagcccaaacccccactctctcacctgcttagcacagaggacatgaacataaaacaccagtacctgcttctccctgtggaggaaaagaattgggagaagccccaggaatctctggctagaataattagtgggagttttctcctgtacaaatccagtctatgaagactgagagaagtacctgctttgtctaatgtgcaaacactgaaacagaaagtcaaggaaaatgaagattcaggcagacatgttgcaaacaaaggaaacaatagctctccagaaactgacactcataaagtgaagagatatgatttacctgacaaagaattaaaaataactcttataaagatgctcactgaggtcaagagaacaatgtgtgtacaaagagagaatttcaataaagagaattattattttttaagaactagaaagaatcattcagtggaagaaaaaaaaatgacctgaaaaattcactagaggaatttagtagcaggctagatcaaagagaaggaaggatcagcaaactcagataaatcactggaaataattcaagccgaggatccaaaaggaaataaaaggaatgacaaagagtgaagaaagcttaacggaggtataggacaccatcaagcagaccaaaatgaaggttatgggagtttctgaaaaagaatggagtgggagtgaaccagaaagcttattccgtaatagctgaaaactttccaaatctggggcagaaaatgtccaccccaaatctagaagcccaaagaacaacaaataagatgaacttaaagaaatacacatagaaatacattataatcaaattatcaaaagttcaaaacaaaaagagaattttgacagcaccaagaaaaagttaacttgttgcatataaagggactcccattagactatcagtggacttttcagcagaaacattgcaagccagtaaggagtaggatggtatattcaaggtgttggaaaaactaccagccaggagtagtacattcagtaaaaccaacatagcacccagcaacacttctccttcaaaaattaaagagagataacagaaactttttcatataaaagctgagggatttaattatgcctagaaccaccttacaagaaatgctaaagggagttcttcaagtagaaagaaaggatgcgaactagtaacaaaataggataagaaagtatgaaactcactggtgaaagtaaatatatagacaagtaccgaatatggtattattgaaatggtggtgggtaaataattttcattctagtgtaaaggaccaaagtattaaaaaactactataactaagaacatgttaaaggtacacaatatgaaatagatataaattgtgacaacattaacataaagtgtgtgtggcaggggcgaagttaaagtgtagagttttatacacaattgaacttaagctattatcagcttaaaataggctatcatagctattagatactttatgtaagtacaaagttaaccacataccaaaaaactatagtagttacaaaaagataaaaaagcaaggaattaaagcatgatagaaaatatcaaggaaacataaaagaaggcagtaaaaaggataaaaggagtgcaagaataacagaaaacaattatcaaagtggcagtggtaaatacttccctatcaatgattacttcatataaatagattaaactctcaaatcaatagaatggctgaatgaataaaaaacaaacaagacccaactatatgctatgtacaaagaactcatgtcagatttaaggaaaaataagctgaaagtgaataaatggaagatatattccatgcaaatggtaaacaaaggacagcaggagtggtcacatttaaataagaaaaaaattgtccctaaaacctatcacaggagacaaagaaggacattatatgataaaaggttcagcataccaggaagatataacaattacagtcatataagcactcaacatcaaaacacctaaatacataaaacaaatgttgacaaactgaagggaaaaatacacagcaatacaataatagtaggacactttaatactccaccttcataatggacagaacatcaagacagaagatcaataaggaaacagaggacttgaataacacattcaaccatgtagacttaaacacatgcaaaatatttcaccaaaaagtagcagagtatgcactgttaataaaagcacacaaatctttctcaaagatagatcatgtagttgttcacaagcgtcttgatttatttttaatttttaatttgtttgggtagatgacaagtgtctatatttagggggcacatgagctattttggtacaggcctgcaatgcctaataatcacatcttagaaaatcgggtatccatcccctcaagcactcataatttgcattataaaaatccaattatactttctaaatactttttaaatttacaattaaagtattattgactattgtcccattgtgttttcaaatactaggtcttattcattttattttttttttgtatccattaaccatccccacttcccccacccgcactactcatcccagcctctagtaaccatccttctattctcaatctccataatctccattgttatgattttcagatctcacagataggtgagaatatgcaatgtatgtttttctgtgcctggattattttatttaatataatgacctccagttccatccatactgttgcaaaggacatgatctcattcttttttatgactgactattacttcattgcatacatgtacaatattacaatattttctttacccatttatctgctgatgaacacctaggttgctcccaaattttggctgttgggaactgtgctgccacaaacatgagagtacagatatctctttgatatactgatttcctttcttttcagtattaacccagaagtaggattactggatcctatggtagctctacttttagttttttgaggaacctccaaactgttctctatagtgattgtactaatttatatttccatcaacagtgtacaagagtttccttttctccacatcctcaccagcatttgtaattgcctgacttttggataaaagccattttaactggggttagatgatatcacattgtagttttgatttccatttgtctgataaccaatgatgttgaacactttttcatatgaccgttggccatttgtgtgtcttcttttgaaaaatatctattcaagtcttttgcccaattttaaaaacgtttattttaggttcaagggtacatgtgcaggtttgttttataggtaaactcgtatcatgggggtttgtggtacagattattttgtcacccaggtactaagcctagtaccaaacagttatttttttctgattctctcccttctcccactatccactctcaagaggcccaagtgtctgttgttcccctctttgtgtccatgtgttctcatcatttatctcccacttataagtgatagtatggggtatttagttttcttttcctgttatagtttgctaaggataatggcctccagttccatcgatgttcctgtaaaggacattatcccattcatttttatggctgcatagtattccatggtatatatgcaccacatttttaatccaatctgctactgctactgctgggtatttaggttgtttctctgtcttcgctattgtgaatagtgttgcagtgaacatacgtgtgcatgtgcctttatagtagaatgtattctattcctttgagtatatacccagtaatgggactgccaggttgaaaggtagctctgtttttagctctttgaggaatcaccatgctcctttctgcaatggctgaactaatttacacccccaccaacagtgtataagcattccctttctctgcaacatcagcagcagcatctgaagggctattttagtaatagcccttcagactggtttgagaggctatctctttatggttttgatttacatttctctaatgatcagtgatgttaagcttttttcctcataagttttttggccacatgtatgtcttctttggaaaagtatctgttcatgtctttttcccacattttaatgaggttatttggtttttttcttgtaaatttgttaaagttccttatagatgctggatattaggcctttgccagatgcatagtttgcaaatattttctctcattctttaggctgtctgtttactctgttggtagtttattttgctgcgcagaagctcttaagtttaattagatcccatgtgtcaattgttgcttttggtgtgattgcttttggcacctttgtcatgaaatctttgcccattcctatgccagaatggtattgcctgggttagggtgtcttgcagaatttttagttttgggttttacatttaagtcttttaaatcaatcttgagttgatttctgtaaacggtataaagaaggagtccagttttgatcttctgcatatggctagtcagacagcccagcaccatttattgaagagaattcctttctccattgcttgtttttgtcagctttattgatcagatggttgtaggtatgcagtcttatttatgagctctctattctgtttcattggtctacatgtttttgtttgtttgtttgtttttggtatcagtaccatgctgttttggttactgtagccctatagcatagtttgaaattggctaccatatgcctccagctttgttcttttagcttaggattgccttggctattcaggctctttttgttgttgttgttgttccatgtgaattgtaacgtagttttttggggttttttgtttgtttgtttattttcctagttctgtaggaatgtcattggtggtttgataggaatagcattgaatttgtgaattgctttgggtagtttattagtccattcttgctttgctataaagagatatctgaaactaggtaatttataaagaaatgagttttaattggttcatgattttgcaggttgtactgtggcttctgcttctggagaggactcaggaagcttccagtcataatagaaggcaaaggggacgccagattcctacatggcaatagctcccttgtatgttatttgtttcttttttcttgttgcttctaggatcccttctttatccttgacatttgggagctcgattattaaaggtctcggagtagtcttctttgggctaaatctgctttgtgttctataaccttctagtacttgaatattggtatctttctctaagtttgggaatttctcttattatcgctttgagtaaatattctacccttatctcttcctctaccttctctttaaggccaataactcttaaatttgctcttattttgaagatattttctacatcttctaggtgtgctttattattttctatttttttccttctgtcttctctgtgtattttcaaatagcctgtaatcagactcactaattctttcttctgtttgatcaattctgcaattaagaaactctgatgcattcttcagcatgtccattgcatttatcaactctaatatttgtttgattctatttattttaatctctttgttaaacttatctgatagaattctgaattccttctcttgtgttatcttgaatttcattgagcttcttcaaaacatctattttgaattccccatctgaaagatcttaaatctctgtttcaccaatattggcccctggtgccttatttagttcattttgttagatcttgttttcctccatgatgctgatgcttgtagatgttcttcagtgttgggcattgaagagttagggatttatcgtagtcttcacagtgtgggcttgtttgtgtctttctcgggaaggctttccaggtatttaaaaggacttatgccccaagcacaataatgttgtggcttttgcagactcatagaaataccaccttggtggtcttgggtaagatctagaggaattctctggataaccaggcaaagactcttgttctttccccttactttctcccaaacatgaaatttctctctgtgctgagccacctgaaactggagatttgttaatgcaaatctgtggctatcacctctgagactgttctggggcagacctgaagccagcacaaaactgggctttaccaaagttccttccctacagggtggcaaattcccccagccccagagcatgtccatagatgctgtctggggaccagggattggagtcaagaaccttagcaatttacctgattttctgatctgctgtaggtaagttggcactcaacccacaatacaatgttcttcctattttcccccccatttctacagcagaggagcctctcattgtgaccaccactaccatcagtccatggggacttcttacaggccactgccaatgtttgcttaaagcccaaggtctattcgtcagcttgtggtgaatgctgccaagcctgggactcaccattcaagtcagtgggctcccctctggaccagggcaggtctagaaatgctgtctaagagcctaggcctgaactggaggaccccaaaaagactgtttgtttctctacctcattgtagtcaagctgttacctatgctgtgtaagacatagtcctctttacctttttttttttttttttttttttttaaacagaaggaatctttcaccatatgcaccacagctgggaatgttcagggtctcccctgaagccaggacatctgagaacccaaggcccaaagcatactccctgcttattgctggtcattattctgggaccaaggtctctttaatcagcaggtgataaatcctgtctagactgcatttttccattcagtgcagcaggttcccttttggcccagtgtgtacctagaaatctcttccagaagctaggtcctggaatggggacctcacaactctacctgctgccctatcctactatgtctgagctggtatccaagatgcaagataaagtcctctttactttttgctcttctctcccttaggagaaggaaagagtaactgacactgctacaagctgcactgcctgaggttaggagagggatggcaaaagctatctatctgctatgtgccacctggtgtctccctgtcacatgcaccctagctctctggctgtaagcatagcctagcattaggagttgcctagaaattgcagtccttgtgtccttagattgccttttgagtttacctaggaccccagagcactttagcccacagcggtgaggcttatagagaaactcaagttcctgtcactgggatgggcagtacccctttggctaggtctgatctaaaagctctctccctgcatgggtggtgactgaacccaacttatctctcttcactgtggcagggcagcactgagttcaatgtaaagtccttcagttgttgtgcgctccctttgcaaagtacacagtttctgtctccatgctgctacggtttaggggaggtgtggcattggcgatttaagactgtctctcccaccctccataatgcctctttccatgatatgaagttaaaaccaggcactatgatcactcacctgatttttggttcttgtgatggtggttttccgtttgcaaatagttgttgaaatttggtgttcctgcagggagtacaaactgtataagcttctatttaccatcttgctctaccccctccttgacatatttaagaagattgaaattatgacaagtatcttttctaaccacaatttagtgaaactggaaatcaataccagaaggaaaactggaaaactgacaaatatattgaaactgaacaatacattcttgagcaacaattggaccaaaaaatagatcaaatcagaaatgaagtgttacctagagacaaattaaaacaaacaaaaaaacccaatataccaaaacttaaaggatgcagcaaaagcagtagtcagagaattcatggtgataaacacctacaataaaaaacaaatctcaaataagcaacctacatttatacctcaagtagctagaaaaatgggaacaaagaacaatgtccaaagctagcagaaagaagaaaaacacaaagatcagagcagatataaataaaatcaaaaacagaaaaataatatacagaaaatatcaatgaaattaagagctggtgttttgaaaagataaagaaaattggcaaacccttagctagagtaagaaaaaaagagagaagactcaaacaaataaattcagaaatgagagaagagatattacaactgacaccccagcaataaaaaagatcataagggactactaagaacaatcatacatcaacaaactggataacctagtagaaatatgtaaattcctagaaacatatgacctaacaagactaaatcataaaaaatagaaagtttcaacagaccaataactagtatgaaaactgaatcaataattaaaacctctcaacaaagaaaaacccagaaccaggtacctcatgggttaactctaccaagcataattgtaaagaaacatcaatgtatttctatttaattaaattgtttttatcataagtagttgttgaattttgtcaaatacgtgttcaccatctgtggaggtcattatgagattcaggattatatgatttttcactgtacatgtgttgatattattatatgtacaataaagagctggaaagttaaaaaaaatcaaacaaagaattaatgccaattctcaccgaaatattattttaaacgaaaatttaagttcaggggtacatgcacaggtttgttaccaggtaaacctgtgtcgtgggggtttgttgtacatattattttatcacccaggtattaagcctagtacccattagttttctttcttgatcctctccctcctcccaccttcaacccttcaataggcctcagcgtgtgttgttcccatttacatgaccatgtgtttgcatcatttagctcccacttgtaagtgagaacatgtggtatttggttttctgttcctgcatagtttgctaaggataatggcctccagctccatccatgtccctgcaaagggcataatctcattcctttttacgggtgcataatattccatggtgtatatgtaccacattttccttatacaatctatcattgatggatatttaaggtgattccatgtctttgctattataaaatgttaaaaggaattaacatttccaaatttattttacaaggccagtattattctgataccaaagccagataaggacaccacaagaaaaaaacaaaaacctacagatcaatgtccctaatgaatttacctgcagaaatgctcaacaaaatgctaagaaactgagggcaatggtgccataaaaaaagtcatacagcatgatcaagggagatgtatcaatgggaagcaaggatggttcaataaataaaaattaattagcatgtgatacatcacattaacagaataaaggataaaaattatatgaccttagtggatgcagaaaatgtgtttgagaaaatttaatatcttctcatgataaaaactccaaacaaactgggaataacaagaaattacctgagcattttaaaggctatatatgaaaagcctacagctaaaccttaaaggtgaaaaccctaaaccttctttttatgatcaagaacaaggcaaggatgttcactcttaccatttctattcaacattatactataagtcttagagaaattaggcaaaagaaaaaaatcaaaagctcccatgttagaaagaaagaaaaattgtgcctgtttgcagattacatgatatatatcatggatgtccaaatgcagaaaaatgaaaccagacccttatcttctatcatgcataaaaagcaacttaaaagcattataaaggcattacacataaaatgtgtaagactccaaacggtaaaacacagagagaaatctttacaacatcagtcttggcaagatttcatggataaaaagcataggcaacaaaagaagaataacaagtgggactatatgaaactaaagagcttctacgtagcaaaggaaacaataaaaaaaagtgaataggtaatctctagtgtgggaaaaaacatttgcaaccaatatttgataagtgattaatcttcaaaatatgcaactaactcacacaactcagcagttaaaacaacaaacaaagaaaaaactaaccacccaatttaaaaaactgtcaaaggatttcagtagacatttctcccaagaaggcatatgaatgaccaactggtaagtgtaaaaatcctcaatatcactaatcatcagaaaaaagaaaatgaaaatcataaagacataccacatcacatctgctagaatggctatagtttttgttgtttttgttttaagttgtgttggtcaggatgtagagaaactggagctcttgcaaactgttggtagtaatgcaaaattactaccaacggtaattagtccctccagaaaatactgtcaaagttcctcaaaaaataattaccattatttacacagcaatcccatttctgtatatttatctaaaagcattgaaatcaggacctcagagagataatagcactcttatgttcattgcagcaccattcacaatagccaatgtaaaaaaacaacttaaatgttcatcaacagatgaatagattttttaaaatgtagaatatacataacacaaatattaagtgtttagaaagaaggctaattctgcaacgagaaaaaggatgaaccttgaggacagtatactaagggaaacccaccagacacagaaagataaatactgcattattccacttatataagttatttaaaattgttaccagaaaaaccagggattcggtctaggttctgctactcactgcacagaaagccaatcatgaaggctgtgaatattgccagggaagaaggctttaattgggtgctgcagccaagggaatgggcgatcagtctcaaatctatctccctgaccacctaaaatcagtggtttatacagcagggaagaaatgtgactccatgaatgaagacaggaattaataaggagtaaggaagagaagttggtcaatggggagcaggtgatagcttaggcagtcaccatgggtgaggaatctggcatctcattgtccagatacaatgaactggtaagtttctgttcctttatactatctgtgaggcctgacggttggttttccgagaaaggaactcggataagacaaatgtaactttctcaagttttaacactgggagagtcaatttctaagtttattcaaaagaaaccacaaatgtaagttccacgggaaaattaggctggttttgaaatcatcaaattcatagaatcagagggcaatggtagttgtcagagcctggagggaagggaaatggggacatactaatcaatgggcataaagtttcagttaagcaagataagctctagagatctgctgcatattttatatctacagtaaacagtgttgtattgtacatttaaaaattgttaaaagggtaaagctcatatttagtgttcttaccaccatatttttttaaatatatggagaaagaatcattttgtctgttttcaaactgaaaagctcatgggcttcattttaaacttttcattgaaatatgatatattcatatataactgatatgaacaaagtatctaattagtactttttaatcatttgtaattggtgaatgtttccatttaataattatccagatcaagaaatatcaggatgccataatgccagaagctgctccctttatgctccagttagtaaatatcatccataaaggtaactgctgttctgatttctatcactacaccatcagtgtagcctgttcttggactttctaatttcttgagagcaaatacatgatgtacctaggtgtgattttctttgcatttcgcctgatacagtatttgtggagcttcttaaatctgtggagtgatgtctgcgatcatatttgaaaaatcatcagccagtattcttcaaatattacaactgtttcactttttcctcttcatgtgaggccccaggtacatacacattaaacttcaaatcttgtccttaagtctcttttttctgttctcttctctgattcacttttctgctattgaaaatcttccagttcaatgattcgcttttctgctactgaaaatctacttttcaaaatgttattatatataatttaaattttttgttgtatatatagtttcctgttctccaataaaattattcatattttctctatttcctgaaatatttattttttagactcctgtctaatctccaatttcaagattacttattatcttatttcacttgggaaaggggtttcatctttccatcctttctcggcatgtctggcgatttttgttgaatgtcaaccattgaatataaataattgtagagcatcaggataatctttctctctctctctctctctctctctctctctctctctctctccatatatctaaactagtctggaagacaagggatatgaaagcatgggagaatttgttaacggaccaagaatggaaatgagatatatcaacttcatctacactaaattagccaaaacttcacaaattctgaaaaatggtttacgccaaggagggaagggaaatgttttgggcaacaactagacagtctctgccacaatgacaaaagagagttctagacacttgactatactaaatcatccattccacatacatttcgagatgataatttccttttgaatcttaacatatactatattttcattccctgatatttggatactatctttatatagacaaagtatttcctactaaggaaaatacttcagaagaaagagagcaagttcctcaataaatttgtatattttttattttctttttattttttattaatttttaactgataaaaattacatatatttactgagcataacatgttttgaatatgcatacattgtggaatagctaaatcaagctaattaacatatgcattatctcttttaagtctttcatatcatgttatatatttctggcctcagagtagtcacttactaattgctggctaagttattttaacgattggattgtgtaatgtgttgttttatatgagttattcattcagaaaatatttttatatgtagacatttatatccatatggtgttacctagctagaaaagcagagattattaataattcaagctttaaaaaaagactaggaaaacactatggtaagagactgaattattcagcttggtttctacgatgatctgattcacagcttttattattgcacttttcctatgttgacattgtctaaccccctcatctattttggctcatcaaatatttgcatgtgtatcgaaaaagactacaggttattagaatttaaaataattgagataatttgggttggttattattataatatctgcttagtgaatctgttctgagaacaacacatggtttcagtaactcatgaaacaaacctcaaggtgttataaataaatcaataaaactttttagtgtttcatgaaggttttttttcacccaaaactatattcttaagaacattcttaagtgaaaaatgaaaagagtttctctaatgaaggcatattttattccatcatgccaccagtttgatctacctaatacataaatttgatcatgttactacttctcttcataaaatctttcaggggcttcctgtgattacaggatgacaggagacctctataatcctgtcttctaacatctgtgccttcaatgtcatattgcaacagtattgcgtttcttagattcagaataggatattacgttgaatatctctgctattatttgtgctgttctattcaaaattccttttcttcttgacatactttctaattcctattgatcttttacagcataaatgctatttttctacaaaagctttatattatccctctcctcacatagtctaaataatgtttttttcatgtatattccaagtgcagcatattatattgtttagtacttattttctaatgtatatcactgtacttttggactataaactcttagatgaaaacagagtattattaatttattacatgtaatccatagtgacactcccaatatatagcaggtgctcatttaatgttatttattgagttaaactgaactaataaaaacataatgtgtcacaggaaaagaaataccattggctgttacaattattattgaaatttatatttggataaattcagtacaaatccattaaatatccaaatattgccaaggcccatatacctattgcttaatagacatcagtagtcataacttggaccctgacttccagaatcaacagcaactctttggcaaaattatctttgaaccatgttcctctgggacaaatttgcttgaggcctgaaaccataatagttaaaagttctcttcattaatctgaataacaaatgccactatgtattgaccaactcttttagtttaaactgtcagaaagcaaaataaggcacagttatctgttatgggcaaaactcattgcataaaaccagcagaaaggcagatgcctaaaatgtcttactctttagaaagagacatataatattttcacacatacttcactgttatactttttaaaggtatcaagttaccatttgacaattactagtgtcttagccataaataatctagtttgtttggtagtaccaattaaccctgaaatatcagtgacttcacacgtgaactttatttctgattcatgctgtatatgtgactcaatctgcagagtgcttactccacatagtcccttaggacctgagctgatgggtgcttcaccaagaggaacgttgttgaatgacaaaggaagaaagatcatacgtggaattctcatactgctttaatattgtttgacacagatgggacatactttacttctactcacagcaattggccagaggtagtgagaggaaactaaggaatctcagggaatatatgaaataaacagatcattactatagatgccataattatcaaacaagctttctggagcaataacttgtattttagtgcacctctttagtctacaaaggttacttaatatgtacatcccaccttgtgctataaataatcaacacacaggtacaaggaaacctgattcaataaaagaaacactggaattaaagttctaatatctttgtgaatcaaaatgtaattcattaagaaatctttaagtagcgtgaaatgtggaataaaaaaagatttaggattcagacagacttggattcaaagagagtatatttaagtaaactgggacaaatagttaaatctctctaggcctcaacatcttaatcagtaacataaaggtctttttacttatattctcagaaataaaggaggggacacacagtgcctgggaaaatattgtagaaatgaaacaaacaaaagagatattgcatattgccacttacaactttgtgtcctttgattattcaaaaatatcattaaccaaatgtgatgatgtcctccagtgaatatacggactagggaggaagaaaggcaacatattctgcccaaatgaatacactacaatgtgacaagtgccccagaaggggtgcatgtatgctgcttttaaaatccagaagtaggagaagaatgagcacttgagataaagggaaggccaggaacacttagataaagaatataagtagaacgcatagagatgagaaacaggcttaataattcataacacatcaaagtgatacattaaatgtgatgctgtatttaaagtgctcagaagagtgtttggtccagggctagcattcaacatatgatagttacgatactcttgtaaattggaagggtttcacaagcagaatggtaccagctcctctttgttacctctggtagaattcagctgtgaatctgtctggtcctggactttttttggttggcaggttattaattattgcctcaatttcagagcccattattggtctattcagagatttgacttcttcctggtttagtcttgggagggtgttatgtgtctaggaatttacccatttcttctagattttctagtttatttacgtagatatgtttatagtattctctgatggtagtttgtatttctgtgggatcggtggtgatatctcatttatcatttttattgcatctatttgattcttctctcttttcttctttattagtcttgctaacggtctattttgttgatcttttcaaaaaaccagctcatggattcattgattttttgaagggttttttgtctctatctcgttcagttctgctctgatcttagttatttcttttcttctgctagcttttgaatttgtttgttcttgcttctctagttcttttaattgtaatgttagggtgtcaattttagatctttcctgctttctcttgtgggcatttagtgctataaatttccctctatacactgctttaaatgtgtcccagagattttggtatgttgtgtctttgttctcaaagaacatctttttttttttttttttttttttttttttgagacagagtcttgctctgtctcccaggctggagtgcagtggcaggatctcagctcactgcaagctccgcctcccaggttcatgccattctcctgcctcagcctcccaagtagctgggactaccagcgccgggaaccacgcccggctaatttttttgtatttttagtagagacggcagggttcggggggcggtttcactttgttagccaggatggtctcaatcacctgacctcgtgatctgcccgcctcggcctcccacagtgctgggattacaggcgtgagctaccacgcccggccagaacatctttatttctgtcttcatttcgttatttacccagtagttattccagagcaggttgttcagtttccacgtagttgtgaggttttgagtgagtttctgaatcctgagttccaatttgattgcattgtggtctgagagacagtttgttgtgatttctgttcttttacatttgccaaggagtgttttacttccaattatgtggtcaattttagaataagtgcaatgtggtactgagaagactgtatattctgttgatttggggtggacagttctgtagatgtctattaggtctgcttggcccagagctgagttcaagtcctgaatatccttgttatttttctgtctcgttgatctgtctaatactgacagtggggtgttagtctcccactattattgtgcgggagtctaagtctctttgtaggtctctaggaacttgctttgtgaatctggatgctcctgtattgggtgcatatatatttaggatagttacctcttcttgttgcattaatccgtttaccattatgtaatgtctttgtctcttttgatcattgttggtttaaagtctgttttatcagagactaggatttcaacccgtttttcttttttctttccatttacttggtaaatcttccttgatccctttattttgagcctatgtatgtctttgcacatgagatgggtctcctgaatacagcacactgatgggtcttgactctttaaccaatttgccagtctatgtcttaattcgtgtattcagaccatttacatttaaggttaatattgtaatacatgaatttgatcctgtcattatgatgctagctggtttgcctgttagttcatgcagtttcttcatagtgtcaatggtctttacaatttggcatttttgcagtgactggtactggttgttcctttccatgtttagtgcttccttcaggagctcttgtaaggcaggcatggtggtaacaaaatctctagcatttgcttgcctgtaaaggattttatttctccttcacttatgaagtttagtttggctggatatgaaattctgggttgaaaattctttcctttaagaatgttgaatattggcccccactctcttctggcttgtagggtttctgccaagagatctgctgttagtctgatgggtttccctttgtgggtaacccaacctttctctctggctgcccttaagatattttcattcatttcaaccttggtgaatctgaatgattatgtgtctcggggttgctcttcttgaggaatatctttgtggtgttctctgtatttcctgaatttgaatgttggtctgccttgctaggttggggaagttttcttggatagtatcttgaagagtgttttccaacttgtttccattctccccatcatgttcaggtaccctaatcaaatgtagatttggtcttttcacatagtcccacattttttgagggctttgtttcttttcactcttttttctctaaccttgtcttctcactttatttcattaagttgatctccaatcactgacatactttcttctgcttgatgattcggttactgaaacttgtgtatgcttcatgaagttcttgtgctgtgtttttcagctccatcaggtcatttatgttcttctctacactggttattctagttagcaatttgtctaacctttttttcaaggttcttaccttccttgcattgggttagaacatgcccctttagctcagagtttgttattatccaccttcggaagcctccttctgtcaatctgtcaaactcattctccatccagttttgttcccttgctggtgaggagttgtgaggagaagaggtgttctggtttttggaattttcagcctttttgcactggtttctccccatctttgtagtttttatctacctttggtctttgatgttggtgacctatggatggggttttggtgtggacatcctttttgtagatgttgatgctattcctttctgtttgttagttttccttctaacagtcaggcccctcagctgcaggtctgttggagtttgctggtggtccactccagaccctatttgcctggatatcaccagcagaggctgcagaacagcaaatattgctgcctgatccttcctctagaagcttcgtcccagaggggctcccaccagatgccagccagagctctccagtatgaggtgtctgtcagcccctactgggaggtgtctcccagtccggctacacgggggtcagggatccagttcaggaggcagtctgttcattatcagagcttgaacactgtgctggaagaaccactgctctcttcagagctgtcaggcagggacgtttaagtctgctgaagctgtgctcacagctgtcccttcccccaggtgctctgtcccagggagatgggggttttatctataagtccctgactggggctgctgtcttttgttcacagatgccctgcccacagaggtgcaacctagagaggcaatcggccttgctgagctgtggtgggctccacccagttcgaacttcccagctgctttgtttacactgtgagcataaaatcacctactcaagtctcagcaatggcggatgcccctaccccaaccaagctggagcatcccaggttgatctcagactgctccactagcagcgagaatttcaagccaatggatcttagcttgctgggctctttgggtgagggacccactgagccaagcaccagagggaatctcctggtctgccaattgcaaagaccatgggaaaagcacagtatctgggcaggagtgtacctttcctcctggtacagtgtctcacagcttcccttggctaggaaaggaaaatcccccaaccccttgtgcttcccaggtgaggcgatgccccaccctgcttcagctcaccctccgtgggctgcactgactgtccaaccagtcccagtgagataaaccagttacatcattggaaatgcagaaaatcacctgccttctgcattgatctcactgcgagctgcagattggagctgttcctattcggccatctagccggaaaatcccactttcagttttttgagttaccctcagtttccgtgctttttctgtttatgtgtggacatcttctcaaaacagtttataaccatttgtgtgtgtgtacccttgttcaacttcgcttttcattctccatgagttccatatttcctgaattaccaaagcatttaagcagagtggattttgttagggatctcaggaatttcaatgcactattaaattttatgttttagtttggggctcttaaacttgtaggtagtataaattaagactccatacctacatacattgaatgcctgggcttttcatatttactttcctgcccaaagtccacacaaaagaaaagctttttaattgtttcctttgctgaaagattggatgagatttttagttcataaggatagacagaattgtggggcttcaggtttaggcagggagaaaagttctagtttcctgtctaaatttcatccataattatatccttagaatctcttccttgtctaaatatctcataggtcttcaatttatcagcctatctaccattgtgattttatttatttcaagtacctcagggatttgtctctttcatctgcctcggttgcacattttaaatgttatcaagcatcgtttttgtgtgtttacagttaactatgtgagcagagttggccatgtcacctgagtctaatcattggtttgaagtacaaagaatttagttataagtagtaatgggcataaggtatagaactgtggatgatgaaaaactatccctctctatttctaggtaagcaaaccaaaatatacaccttgttttaagtggcttattatttatatattatacaatataaagactctgcttttcttgtgtcgggtatccagatatgttattctaatatattaaatgaatattcaaagcttctaggaagggcattttacatttctattgtgaaatatgaagagctgttggacttattgagtgaaaagtaaaacccatccaaatgtgtctctaattaaatagttttgcattattaatctggtagagtttaaacttttgttttaaaataggttttgagctttaaaattccctcagcaaaaaaaaaaaaagccactgcaaggataattctgaactttcttgagcctatgagtacatgtctagtttgaaggtcactatttcctaataaaaaaaaaaatgaggtgtgacaaagtgataagcttggtttttaacaagaacacaatactatacataacaaatgaaattttctcacatttattggataattaatttatttagaatctcttgtccctacttaataatgcagaacttcagctactgccatacccacctccctcttcccttgcttttttcttcttagtatttttggaaccatctaaaaggtttcaaacagttaccctgaggggcctgcaagttttagccccaacccctaagtaattaacctcctctattccattccttgctttttcctcccaagtaatgattcctacgggtttattttctttcattcctttcacttaccttcccatcatgacgtcaaccaacatggagcttctttaaaaggtatgcacccaccgtgcacttctgcctctctcactggccatggagtgtgcttaacatccagcaagttcctgctgcctgcactgatgtgctagattttttggtttgtgcacagatttaatgtaaaatagaaaaaaaaatgtttttttcttgtctctgttttttgtttgttttttagtattatacttaaaaattttactatcaaggcagagctgcttattctctagtgtcttataacagtcataggaaggaaaccactgttaaatttttgcttgtagttttccctacctcaagggtgactcaagatacttgtgagctggggattgggtcaaaaaaaaataaaatgtctttaatctttctttcaaagagattccagtatatcctacagctttggcatccttggcagtgactacctcacaaactcaacgtgataactctatcttttgttcaaaaaccacttatgaaggtgtcagctgggtttggtgactcatttgtaacaaataaagtaggagaagaaaactcgcaactctaaagtgaagaaacctggaagacatcaccttagccaactgatcacatttaacatgatcagtaaaaagtcctgttaacaccagattcataatgtgatgaaagggctcttcacctccacggtattcttctccaaaagcaataaacccagtgtagacatgagaaagcattaaataaatccaaactgaaggtcgctttgcaaaataactgaccagtactcttaaaggaagtaaggtcatgacaagaaaagaaagactgagaaactgtcacagactacaggagactgaggagccatgggaactaaatacagcatggtatcctggatcaaatcacagaacagaaaaaaggcatggtgaaaaaactggtaaaattcaaataaataattccatgtaggtatttgtattctatccacattaattttttagtttcaataaatataccatgattttatattatgtaaaaactaggggaaacaggacattactaattatctttacaactctcctctaaacctaaaaatattttaaatgtttttgtaaacaaaatattaagctcctctaattcaaaaatctcatattaatagaacctcactaggctgtgctagacctacttttaagaactaggtcaccatatccttggagaaaaagtgatatattctgaacccaaagataatctgttgtattctggatgttttttcctgaagggaacgacccttaattaagtcaatagtcaagagtcatcacttactggaagaacctcattacctgcctagtgttttaatcagaacttgaatttaagcaaccaatggcatatttagttggataaactaaactgaaattaaatttaaaatatgaaaaagaagcagagcatggtggctcacgcttgtaatcctagcactttgagaggccaaggcaggtagatcacctgaagtcaggagttttagaccagcctggccaacatggtgaaagcctgtctctaatgaaaatacaaaaaattagctgagcatactggcgcatgcctgtattcccagctacttgggcgtgggggggcaggggaggaggttgcagtgagctaagatggtgccattgcacgcccgcctgggggacaacagcgaaactctgcctcaaaaaaaagagagagagagagagaaagactttctcaaagggcagaaaactttcataaattcttgtgacatatactgtagccgactgcaatacaaatgaggcaggctgtcaaacttctgtataaaatctgatcccaccatctatccaataccaacaaaagtctgatttccattaaggtggaagacttgtgatgatgtagtattttgtattctgttccttccaaatggcagagcatcttcaaaaaaatacattagggtacatttaggtatttcattacactttgctgggataaatgggccctggatttttacactggaggtctatttattggaagaataaatgacatatgcttttgactttatatttctttaaaatcaatcattctgtgtttagactcttctccaaattgcagaagcagattaatgctgcaattatctgtgttagtaactgaatgactctgatagcaaacctcaaagacatattgatttcacaacctttctaaataaataccccctctcaccaatctcaagtaaatagccaccttctgccctaaacacttaataacaaagtggtctcttaggattgaagaaagtcacgacactgttcactcatccaaaacttcccttgctaaaaccattttttcttctttttattcctatatttccatcagtttttaactcacacaaacctcacctttctaccacattacactggacccattgcaatatccttttctgccttgcttccaacccttcattcagaagttgcatgcccaggcaaaagatagcactagttattgcacacaaagttacaaatatctctaatgattagcatgattatataatttaacatctaaatgacagcccttttgagattaagtggggacataaaccaaatgggatactaggacaaaaggcataaagtgacactgtccatgagaatgtggcatatggtcatcctcctgataaaactcaatgtgaggctttcctctaagaaaaaggaaagtttcatcaagtgaagacttaaatttaaaaaacaataatttgtaaatttttaatctcaaataacaagctgaagtcacaggattttacccactaagggagatcttgcctgaactaaaataatatgtctattttctatcttcagttcttcatcttttaggaaactctagtaagacagtaacaaatgtaattaaaaattacttgcacatgtagtcttttaatttaaagtactataatagctattatctttcttaaactgtgtaagaactcttgcgcttgtgcagattgacattgctccttttgtagatgaggacagtgagtcaaaatttaagactaggatgctgtctatttatttttcagtcaaaaaaaaaaagaggacactaactaccttcattcttttatctgtcagactctgtgttggagattaagatgaagatgatgcagtctcttcttccatgttgcttatggtcaaagtggaagagatagacaggtattgtagacaagactcactttttgtatccagtatattttgtattaaagcatagcaacctacttacattctaaatctgctatgacagctgcccatatttttcaatagcttcatatacaatttttggagctttagacacagctaaagttgtgtttagacaaaggtaaagtttttgttcttttgttgttaactttttttttgttctctgagaaatcagggaagagatcttttctatggaccaaaaaaataagggaggtaagtttctgaatgggctcctttctagagaaacatatgacagtagtgattatagactaatggccaggtgagctaggcacttatgtgatgtctcaagagtgcgacttatcaaaaaagaataaagacacacgttgactacaaatgaaaatattggaagcacgctgggttaaaccaaggtaagttgaattaggtcataaggaacaaaaaccaggtggctcagcagtgggcaagggtacttttaagatagctttggaaaaatacttttgtttttaaaaactgatgctaaatcgatcagctttatttaaaatttttgcaattactttaaagcaaccaccacaggtaagtatgcagaatagtcttgatttatcatactcaaaatgggatctagcatcattggcatcactggggagcctttcaagactgcaaaatatcaattgaacaagatgcccaggttattcctatatgcagtagactttaagaagcactgttataatgggataatttatacaatgcactctcagatcatattttaagagttgcaagttttcataatacccttgcagaggatccaggccagacctacatagaacagttgtttgaataggaagtggctcaagtttcccaataaagcaaagaaaacttttaaaatgacagctttgtctctgaaaagcaatggcttattgccaatattctgttttggtgattgccaagtaggtctgacctttattgtacctagcatagattgcagttcctcttccaaactttcattcccatgggggcagttaacaaactgattccaattgtttgtttcatgttcttgtgaattcaccatagacagcatattaactaggtcatgttatgggaatggcatatgctaaaacttttaataaaggtggtggtggcaggagataccactttgtttcacttttgttgtttgagtgaaaaagacatcctttgggtaatttatcaggcactggatatttaagaaatttgcttgggggaaaaaacttatggtcaatgacttcttaggaccctacatttttaaagttctccaaatgcagtgtaggataaagagcatgattatgaaactgggcaatctaatattacccttataagctacatgacttccagaaagttacttaacatctcaaagtttccattttcttatctataagatagagataattatatttaccttgaaggagagtggtgagatataacaagattttatatatatatatatatatgtcagatatatacatgtcagatatatatatgtcagatatatatatgtcagatatatgtatgtgtcatgtatatgtcagatatatatatgtcagatataaatatatatgtgtcagatatatatatctgaagtacctagcccctgtttagccctttataaatgttagtttttttttcatttattgtcaccctatttctctaaactgataaaagtgtgaaggaaaaaccatttgagctgtttattttcttattatatcatcttggaaagcacaaacaaccaggggaaagagactgcataaatggaatgaatattacattttaaacatgatgatatcatatattcaaacaatactgttagaatcttattaagctgggagcacattatactatccttaagttctctgctataaaaatacctaatatgctagcttatgaggtttcaaaacagccgcagacacatttacaaagaacatatttatttccaacctaccatctactttgagctctcactttcagacaacaaacctctcccaagcagcaatatcatcccctgccatcctacatatacacaaaatgttgcaggacttttccttagttcagctaaagacggggttctttgtcccacagccacaaaaattcaggctcacaaacaatgtgaatggtaaatggtaaaacagggttttattgggtaaaaaggaagtaaagggggaaccagcgactctcccaaggccaaagtccctgctagagtgcttcccacccacagcttgaatcccagattccacacaagaagaggaggaggccgacttttccccactgcaaagggcatgaacttctgtggctccaccccagtgcatagggcggttggggtttttccagggagcccctcccacctggctctcattgtgacactcccagataactggtagcaatagttatggttgctaggacttgggtgcatgatgctggctttggttagttcccttggtcttactttcccaaaaaggaaacctctgggcaacaggcaccctatttattctctatttattccattacctggcaggatttgcaggataattgttcagaactagaatattaatccagatttctacattacccatccctcttgttctttctgagctgcagccagggattgatggttggttcacaggagcaagtaaggttagtctaaagtgtaggcaaaaacttaaaaacaactaatgagtttagaatgtaatgacaaacgtatggtaagttttggaacataatttctctccagtccccatttttgttaaaaaaaaaattatgataaggactgagtggtttgcaaaatagacattagccttatacttggcctgattacctgcataaagtgaagcaagaataactatttctacataggtcttttggattggctttgacggaaggctgtttcacaaggaatctcaggtaagacccttttttttgagatggagtctcgctctatcaccaggctggagtccagtggcgcaatctcggctcaccgcaacctccaactccctggtttaagggattctcctgcctcagcctcccggattgctggaattattattattattattattattattattattattattattatttttgtatttttagtagagatgaggtttcaccatgttggccaggatcgtctctatctcctgacctcatgacccacccgcctcagcctcccaaagtgctgcaattacaggcatgagccacctcgtccggccagataagacctttaaaagctgagcccaaccatgggtttgtaacctcaaaacacgtatgagttgggtgattctctcctcttaaggacccaagataaactgggagctcctagacttgttagaaagtgacatttttttacagaccacaggtcaggagccctgtacagggactgcgtagatgaaggtatgaggccagtttcccccatggggcatttacaggctctgcaagtcaagcttgactccttaaagggaagcacacccttccagtcaaagctttggtaaaataatcactttctccaattgtgttctgttgcaaaagaaaaattgattcttattgtactgatgcaaacaaccatattgccaggagaatactcacagacagtttccaaattttagaggaaccaggcagagagaaacaagcatgcttcaaattttgatcatagggggtataacttactcaattattaaaggctgtaaatagttcaaaataagtttccttgactctgaacaacaaaacaaggatcagcaatattccaagcaaaagtcaaaaagatttgcttcagcttcctgagttcagtccatttagttaactcattttgcttgacattcgtgaacatttcagctctctgagtcctgtacattttcctttattccaatgttacaatctctaaagttgttaaaaggctgtatttgagagcacctgttaaagttatatagctcattataaaccatcctttgaaaaggattaaataagacaacaattgtctgtgaattgcaaaatgtccagggtagttacagttagaaacacaactgataaagaagtttggttatctctgtggtttacaataacataacataaaaaccttaattatgattcatagcatatactcggacattagaattttagatgccccatacaattttggaacatatattagcattaatcaccaaaatataacctaaagaagattggcatcattttggcaatcccacgtacctaaacatgtcaactaatcctgtttacctgttatttctggacactgatcaggggccctctgaagtattccaaaagctaggtgccagggaagacaattttgaaactgaagtttgatttggggaaggctgttaaatgttcaaggtttaaaacacttggtattatgaaatagaattccagactagcaccagttatttatttttgccggaatgataactcagaaattctaaagaagcaaaaaccttttataaccgtttacaaattttgccagagagcatgttagcaccttaggaacaccttgttacgcttttatttcaatgcccaatttacagaaaaaaacatgtaatactccttttttaatttagttaatatgttcacatagagaacctcttctgcaagattaatttccacaattattccaccgcttctctgaaacttcatctttttcctaatttaactcaaaacaatcctttaacactaggcaaaagtttacatttccatgccttcttataactttttacaaaaacacacacacatacacattttactgtttttacactccttgcgtgtacatctatttctagtagtttcaattaaatcctagaaattttaactttaaggtaaaacttgctaagttggctttaattgtgtgctaactgcagccaaggtgtgccttcatggttagttccataggtcccctagccttaccagttgtgaagccggcaagtcaaatagttttcaaaacccaaaaagcagtttgtaacttcaaaacacatagcaaaccttgcatctgacctgcattttaccaatagtctttagggctgtttatatttgttaacgagtaaagtcacatgaactgaaagataccacagcttttatcttccctttgaaaaatattagatgcaagcaattgcctttctttaaaccaaattaattagagctctttttacagacattacacacaacacacacaggcagaagaaaacccagtctctgtgtagggccctttaaaagacagggctaggcaactatgcagatatctaacctgagagtgctcatccactaaggtagggttgctaaacaaagccctgccaagtagttactggccatgtccccaggatgtaaaacaagatgaaagcttgatttcacaaccaaaacttggcagagaatacaatgacagtttgggggacgggggggcggggcggagaggcagggcgggcgggggctaacctagtaaaattcttctgaaagaaaaaaaaaacggtcaggcgcggtggctcatgcctgtaatcccagcactttggaaggctgaggcacgtggatctcctgaggacaggagttcgagaccagcctggccaacatggtgaaaccccgtctctactaaaaatatttaaaaattagctgggcatggtggtgcacacctgtaatcccagctactcgggaggctaagccaggagaattgcttggactcaggagagggaggttgcagtgagctgacacggtgccactgcacttcagccttggcgatagagtgaaactccgtctcaaaaaaaagaaaaaaaaaaaactttaaagattaactgccggcagggtgaaagggaaggaaaaaattacagtttaaaaatgcctgaggaagaacctcttattcttatgcaagtggttcctccaccagggagaaagtttaattcctgtcctatggagctgaatctcttggctggaaaagcggaaggctccagcagcagcacttggtggctaggacccttgggccatgcgtcccagcccctgcagggagcgggagcggcgtggaactgctgctcgacagtccctcctgaaaaaggaaggaaaaggccatgaggatgaaaaggctcagaagggagaaggaaaaagaattctcggtttgcatcttactcaccacttctccagcccccaagttgcgtgccaaaaatgtttcaggacttttctgtagttcagctaaagacgaggttcttgtccgtcccacggccatgaaaatttagactcgcagatggtttaaagggcgagtaaagcagggttttaatgggtgaaaagaggcaaaaaaggggggaaacacatactcttcgaaagccagagttcctctgctaaagtgcttcccgccaggccaatcgaatcccaggttccacacaggaagaggaggggccaggatcctccctgctgcaaatggcgggaacttcctgaggttccaccacagcggataggctggctgcatttctcggaggaatcccctcccatctggctgtcgcaaaaatgctccaggcttcatttttttccacattgcttttgatctatcaggattatttaccacccctatttaccattgctttcaattataaacataataaaacaaaataactcctattactagcaataaatgacgtaaagaatatccttaccttaccttaacaggtattgtgtatatattttagcagaaatttatgggggtgatatttcaacccccatggagtgtctttgtccgtattacaaatatggacatggagtaatttgtccatattagatatagaggtaagagagggagagagaaggcattgaggggaacaaactcgaagggtagcttctagttctcctttgatcacctactgtttacatgaggacttgactatagtaaccaatatttagtgatccaatatttaaatacttttaaatctgaaacaatttatttttaagcaaaattcttcacagtactcatcaatatgtattcttgtcaattatttttttaataagaaaaaatagtcatttggtttaatctttttaaagaggttgtaaagatgagatactataaaagctttatagctgagatcctgattagaatacacctatgagttttgttaacaattaaagcaaagttccaagctaggaagaaattggcgcttataagtattttaaaactgtttcttccaaaagttaatacataaaataacttttttctcaccaaaaacatagcaaaaaaaccctataaaaccagcatggagtggcaatataggtcttactacaaaatgaacagcactatattctcatttttgcctgtcacatcattctattattgatcaagggagaaagtagtctaaaattccacacggagctgttaatacctgtggtttggggactttttttggggtactgctataataaaataccttataatgagtaatatataaacaatagatatttatttttcacaattctggaaacagaagtcccagattaaggtgctggcaaatttggtgtctggtgagggttcgtttctcatagatggttccatattgatattctcacttggagaaggagctggaagatttgggaagtctttaaggccccttttataagggcattaatcccattaatgaaagcagagccctcatcacctaccacctcccaaagtgtctaccttccatcacctcagggcttaagtttcaacatataaattttacaggagcatgtacatccaaaccatagcaggatgagaaatccctttcactatttataaaatttcaaaaaaaaaaaaccccagtgatctagagaggcaacaaaaataataactcaattctgattatgtgaaagcttgagggttttgagttaacaatatcttctgagagaatgcccttagatcttcttaaagagatgttagtgttaaaaccactacaaggatatatttgtcatctatatctgtatagtctaggatctgttgttcaaatgagtgattcaagttcactaaagtcgttattcttccttcattatttaccaatatgctatagacgaattcagtcattccttgtagagcagctaccacactgctagctgaatctgaccaaaactttacagattttccaatattttaggtaccatgtatttgtgttgaataattgatattctgttttctcagaactgtctggataactacatagaatacatttactaaagacaattttccatttgttataagttttcattgtaattcactctccactaccaatggggatagactgacgccttaatggatatttcaagtacgaatattaccgcttcatattgaaataaattattttaggcagaaaactgcaaaatggtattgtctttcccagaattcataaaaataataccagttctctgtttctcaatgtctgttattaggaggactcagaaaaacaagacaaacctgctatgaactcttaagtttctggccagaggtttagtcagtaaactataattgatctgaaagaatgtatgatatatctagtatgcagtaatttaggcagattcatattgaagaatgattgaatatgaaaaaatctattcctactttctttgttgctgcacatcaaactgcacatcaaacctttattccaatcatagtttaaatagaatcactagaaatattgggcagaggtgaggctctacataattgttaatcaccccatatgcagccatctctcaaattcaaaacaatgattaagaggccttaatgcacagtcttggtttcaattgttgttcatccactcactaaccaaacatttgttgactagcaaatacatttaaaaataaatgagaaacagaaccttgctttcagaagctcatagcctactgggagaagttgaaaggtaatcacacgattataataagacagtggtaacttttacagtagcgaaagttacaaaaaagcaattggagagggtgactagaaatctatgcaaaatgttcatttgggcataaacaggtaggtttatctggacccagcacattgagaaactgggagaaggtgtagaattagaaacagtgtaaaggatgaatgaaacctgcctcaggtatgagaacattaaacatatttaaaatagattccaaggtaacataaaataatagatgatcctcaatttagaatggggctatattatgttttcaacatacaatgggtttactgggaaataaccccatcataagtccaggactctaccgaatgtgttttcattttacaccattgtaaagtaaagaaattacaagtcaaaccatcataagttgggccctggctataaaataattcactacacacccactctctggtattttgttacaacagccctggcaagtgaatacaacaggtgaccaacaggagttgcatattgatagctacatagaatgcagaacagctaggattcaaacactagaattcttatagcatagtccatacacttaattctctcacaataaaactttcatgacaaatgtggaaactgaggtagcaagtggaagtcacatgccccatgttgcacatttgtgcaacccagagccgggatttaaactagctctatttgatttcctctgagataatctaaaagaaattttatgattccttagatagtcagtttagctaaaagctgcatttcacctagtttcaactttcctataagtgagtgttgaggaaatgcgagttttgacacatgtatacaggctactaagttaatttccatggatgaaaaatggcaaaattttgcaaaggagctccatagtctcttaaggcactagcgtcatattttacatcaactcctaactgcccctgttaagccatgcatcatatcattcttcataatatcaatttaaacacaaattttatttgtcaggctgatgttgaaagccttttagtgccttcaatagctaccagaagaaccattacgatagatgccctaaattataaagcgtttcccaggagtctgactactcacatgttttagttagtgactgaggaattgcaagcatcaaccaggactgattatcagttatataatgacttaggtcaaagcttcctctattctggcacaaatcactcctttaaactttggacctcatcctagcctacatgtggaaaaggtcctcacattctaagggttagggaaaaaaaaagaaaccttagggacactaaattaaattctacaattcaaagttcttcccatcaaattatataagaaacttctcatgtttaaatgcattttctttattgcaatggttagtactgtaaattattaaattagtaacaacattcctccatgggagaatctgataatggtacttaaataccaccaagattaaacatttttgacaaagtaccatagtatagtgggaaagtggtagacaatgtctacaatacagcagatttataatatttgtggaactgtttctgaaataataaagtccttctaccttcactgactccagacttatgaaaagtaaacatagatttatggagctccaggcccaatcccttactagtttttttaggactatctcccttctagaaatgtcctggatatgtacaattttccatccatccatccatctttctgggctgcatgcctacgatgggtggcaagcactgtttcattactggggatatggcggagcacattcccagctatggtggccatggggaaagcctccttctgcttgagaaaagaagaaagaaaagtaaaggggactttgtgctgcagcttgggtaccagctcagccatggtaaggtagagcacaaagcaagcttctgtggtccctgattccaggatttggcttctataaagaatttctggacttatgctaggccagaaaagaacccacttacctgaaggggatgttccaagtctggcagcattcatcataagctgactttagagccgttgggctatgaatgaacatcagcaggagtcaggccgtatgtcccctggaccctgggtggtggtggccatgaataggaggaaacaagcagattcctcctgcttgaaaaaagaagaggaaagtgtgggagagactttgtcttgtggcttggatgccagctcagccacagtagaataaagcactaagtagattcctaaggttgctgacttcaggctatggctcaagcagaaaagttagtaagattgaagacaagctctgaaacaggtagaaaagacaaaacaaaaaagaatagaaaagaatgaagcatacctacaagatctacacagtacctcaaaagggctaatctaaaagttattgaccttacagaggaggtggagagagatatttgggtagaaaatgtattcaaagggataatattgaagaactttccaaatctggagaaaaacattaatatttaagtacaagaaggttgtagaactccaaacacatttaatataaataagactaaaaacataataatcaacttccaaagatcaagaacaacaacagcaataaaaatactaaaaagagcaacagaaaagaaacaacatacaaaggagcttaatacatttggcagcagacttctcactggaaatgttataggcctggagagagtggcataaaatatttaaatgtaaagagaaaaaaaccttttatcctacaatagtatatccagtgaaaatacccctaaaacgtgaaggagaaataaacattttcccagacaaacaaaagctgaaggatttcatcaacaccagacctgtcctacaagaaatgctatagggaattcttatcagaaagaaaaaaatattaatgagtaataagaaatcaagtgaaggaacaaaactcactgataaagtaagtacacggaaaaacagaatattataacactacaattgtagtgtgtaaactactcatgtctgaagtagaaaaactaaattgtgaacctatcaaaaactataattacaccaactttttaagacctaaactgtataataagacataaatagaaacaacaaagagttaaaaagtgagaagatgaaattagagtatagagatattagttttctctttgcttctttgtcagtttgtttctgcaattagtgttgtcgtcagtttaaaataatgggttatatgatattgtttgcaagtctcatagaaacctcaaataaaaaacctgcaatagagacagaaacacctaaagcagaatattaaaacataccaccagagaaaatcacttatgaaaagaaagaaaacaaggaaaaagggaaggaagggaagaccacaaaactaacagaaaacacataaaaatggcaggggtaagtcattattgtgagtaataagtttgaaggtaaatggattaatctctccagttaaaagacacaaagtggctcaatagataaaacaataaggtccaataatctgttgcctttaggaaacacaccaagacacatatagactaaaaataaagagatggaagaagatattccatgcaaatggaaaccagaaaagggcagaggtagatatgcttctatgagacaaaatagattttaagaaaaaaatataaaaagagataaagaaggtcataatataatgacaaagggatcaattcagccagaggattcaacaatcgcaattatatttgaaaccaacactggaccacccagatatataaagcaaatattattaaagatgaagaaagagtttgaccttgataaaatgatagctggagccttcagcaccctactttcaccattggacagataatccagatagaaaatcaaaagacatatcagtcttagtctgcactgtataccaaatcgacctggaagatatttacaaaacatttcaaccaagggctgcagaatgcacattcttctcctcagcacatagaccattctcaaggatatcctcattttaggccacaaaacaagttttaaagtaattcaaaaaattaaaattatatcaaatatcttctctgaccacaatgggataaaaccagaaatcaataacaagaggaattttgaaaactatacaaacccacaccaattaaacgatatgctcctgaataaccagtgggtcaataaggaaattaagaaaattttgaaaatctttgaaacaaatgatattggaaacacaacataccaaaatcaatggaatacagcaaatacagtactaagaagaaagtgtatggcaaaaagcacctacatccaaaacgtagaaaaagttcaaattactgtaacctaatgacacatcttaaagaactggaaatgcaagagcaaatcaaatggaaaattagtaaaagaaaagaaataatgaaagtcagagcataaacaaataaaatttaaattaataaaatacaaaaagtcaacaaaatggaaagctgggttttttttgaaaagaaaaaattgacaaaactttagccagactatttaaaatagaaagaagacccaaactaataaaatcagagactaaaaagaaaacattacaactgatacagcagaaattcaaaggatcattgaaaactactctgatcaactataggcaaaaaaatttgaaaatgtagaataaatggataagtttctagacacatacaaactaccgaggttgagccatgacaaaactgcaaaacctgaataaaccaagagcaactaatgagatcacagctgcaacaaaagtccttattgtgggtatggggaagtgggaatggttaagggttacaaaaatgtagttagatagaatgaataagatctaatatttgatagcacaacaggataattacagtcaaaataatttattgtacatttaaaaataactacaagaatataattggaatctttgtagtacaaagaaatgataaatgcttaaggtgatggatactccatttactctgatgtgattattacacattgcattcctgtatcaaaatatctcatgtacctcataaatatatctacctaccttgtacctatgaaacttaaaaattaacaaaaaatagatgtggaggagagaatattagaaaacattaatattattgctacatacaaaactttccatataaagttagagaccaaattacatttgcaatatttaaattttattaatttcattattaaatttacataacaacatagaaaaaaagaaaaaccaaccaactgttctgattaggcatattaggatgcataggttctgtgacttgcaaatgttcagttgtagagccagggccagaacatagctattttgatttcaaattatttcttctttccattttactctgaggcttcttgggagaacaagaagtgaataggctcccacagtacacaaccaggaaatgattattttaaacaatggtagtaactccctttcctaggagtgtgttctggttcctcaaaatcttgggtcctacatgttgcctactccaaaggttgttcaatggttttctggtatctcttttagaagatgttaataagcagaaatgacaatttcatcataaaaaaaacttttaagaaaaggaaaaaattaagttatccatagagaatatgtagtgtgatccaggctcttcacgaaggctatctgcataggatttgttacttccctttatagaaaacacacacatacacatacacacagagtaaaataaaactccacttacaatcccatcatgattcaaaatacttataaattgcaaagcaaaaatccctgcctgtgctcccttcaattccacactactccactcctgctttggtctggagtcttccagacttttcctaatgccattatatagagcacactattactttctatctcagtctccttatattcccgcaatacccccagtttaaaaattttatacatactcatcagcagctcacttttttattccccttagttatacatcatccacattcatatgaatttaacatttaacacaaacttgtagaaaaaagtgtgtgcttataattatttacccaaataagaacattaaggatcagatttcagaaatcatgcccaaagccacagagtagtggcaaagtcagatcatggatctgactcccccttatttcacaccccattcccttttccctaaaatatgaagtccccctaggagaagagagggcaccatccactcccttcattgttttatgaacagtctgctgattagcatcagatatactaagtctatcaaggatttggatataatccactgaacttttgggtctaaattccacctgttactaaaccctctccaaaagtaaaagctgtgaacaatttaaagaagcacagccggtggaggcagctgtgggactagtcggaattggcaccaccaccaaggctgacagaagctacagtgatgttggggagatgcctgtggcttctgagccaattctcttttccatgttgctgacatcaggaggtttccagacctggccatgtgcattcaagcgttgtttacttgcttcctgggtgaacacagtggcattaatatctgaaccaaccatatcatatgctttgcttttatgtagaattttgaatgcaaaggttggactttcccacttgactctttctgccattatcctaaaggcaataagatacactcctgtttcagacatgacatctaattagcaggtaagtccagcctttagcaactaatactctacttggcacacagagattgctcaatcaattttgactgatagagtgaatgaacagatgattgggtaatgtcactggatccccaagtgggctttgtttgctcacagtgggtgtatttgtcagggttctctaacaggacagatctaataggatagatgaatatatgaaggggagtatattaggagaattgactcacataatcacaaggttaagtcccgcaataggctgtctgtcaactgaggagcagggaagtcagtccgagtcccaaaacctcaaaagtagggaagtaaacagtgcagccttcagtctgtggccgaagatctgagagcctctggcaaatcactgatgtaagttcaagagtccaaaagctgaagaccttggagtcccttgtttgagggcaggaagcatccagcgcaggagaaagatggacgccaggagactcagccagtctagtccttccatgttcttctgcctgcatttattctagcatcactggcaactgattagattgtgcccacccagattgatggtgggtctgcctctctcagtctactgactcaaatgttaatctcctgtggcaacaacctcacagacccactcagcaacaatactttgcatccttcaatctgagcaagttgacactcaatattaaccatcacagtggataaggtcagagctttaaggtattccagtcaaaacaacttcattgaaacgtctgtgacataaaacaaagaacattcaacttataataagaaaactagagtctttgtcctgaatcttcaggctacatgtctagagatgagtcacttaatctctctgtgtctcaaactattcgtcttaaataatggagtgggggcactatatgatagctctatttcagagttcttgcatgtcattaatgaaaatgtcaatgtggtctcttaaaccactatataaaataaaacaaataaaatgttggtcgtataggaattttacctaacaattagacgcaatactaaagattaggcacagtttttgtggttaggatactgaccaaataattgtggcagcaaggtagatatggaattactggaaacataatttccctaatgcacaagaagcccaggtaagcttgatgcagcccaggaagataaattggatttatcaaagaagtcttgtaaagcagatgaagttgaagaacataatgttctgacaacctaaatcattactaattctcaaagcttttctgagtttgtgtaaatattgaaattaatttctcttaggaataatgccactatggactctgaaaaccatgtggacactgtctcctgagtctgcccttaaactagtcctggaaagattgccaagctgtccctgtatcacaggagacagatgagaaagtgaatgtgtgtcattgactgcagccagtccaagaccatctcttcctctgttcctcactctttcaacttttcctttttccttctgacatctttggtttcagatacccgtttctgacttctattttgtcttggcacattcttctctgtctaagtgacctcttcaacccttcctaacccatttggactctcagcttcctgtgtacccagtttcagcttctttgcaactcctgttaaggtacattttgctgctagccttgaccttgcaagaatcacaccaggtaggctaaccttaccccttgtctctcacactgaccctacgtctccccattacaagagggagaaacaagtatttctgatttttgctgagtgaatacagatagggaatggaagtgtgaaagttcaatagctcggtccttatttaccatctctagagagtcctatctttttcatctctacctgttcttttcttcagcttctaggttcctaggtgaataattcagactttacttatttatttataccaggtgatcggaggtatcttacacataaatatagatgcagtaagatggaaaaactttggttaaaaaaaaaagaataaaagatgaaaatccaagtaatcaaaatggaagaaggagaagaaaaataaaattcagaaaaccaaggctattaagagtgatgacaattaaatctattatgtgcgtcccagtttcttaacagctaaaaactgaagaaacttggtgggtcataaagttctcatttttgattagcaagatacagatgagtttataaattaaaatcaggctgtatcttgggctgggctctgaagaaaaataaaattcccagtaggtcttcatataagggagtttaaataaaaataaaggatatttgtaatagttttactcatccccctcaaaacaaaatactcctttattccatatatgactattttttatactgaaactcagtaaaatttgtggaaatacatttcaatcttgttcagtaaagataactatacacataccagaaagaataaattgactgtgaagaatagacatgggctccttcaaagactctgcaccaaatttgcattaattttttttttcttaaggaaggtctccttgattatatgaaatatatgtttgtgatcctccaatacctggaggtaccttgaatcagctatcatgtaatctgggtaatctctaaggcagtttatggaatttgaaaagtgactaataacttttattgactggccttcaaaacatcagccgtctcttctgggctgctaacattgttggtatgatatgaaagggaagctattattgacaaatgacagtgtatccacaaactctaaataatatgactattcaatgactactctcaaaatctcactataaattgtctttgttaaatgcagtcagtactgaaataaaaaacgcagtttgtacttttaagaaacgtttaataggaaacaaatatgcattacaatatatcatgagtactattattacaatatatacaaggagtaatgagaatattaaagaaaaaaaacacatgcttgagaatttccagggcagtgaaaatactctgtgtaataattataataatggatgtatgccattttctgcttttcaaacccatagaatgtacagcactaaaagtgaatgctaatgtaagctacggacttggggcaataatgatatgtcagtgtaggttcatcgattgtaacaaatgtaccactctggtgggagatttgataaagggagaggctgtgcatgtgagaggaaaagtacatgtaggctatctctgtacctttctctcaattttgctgtgaacctaaaactgctctaaaagctaaagttgttaataaaacaacaacaaaatagtgtgcttaatttctgtggaagagctagagacggatttacccaaaaataaaattaacacatgtaatattttggtatgaaaatagataattagctcaaatttccttgttatattaggtatattagttatttaatttgaaaatgatgtcttatggtagtaaaaacaatagggaataaaaagagaagaggaatgagtttagatattggtggattatttggaaagatagagacatctgagacaataaattcagggattggactagctagaaaaatggagaactaagattaggatggaggtgctaaccgggccaggcagaagatcctgagtggtcctgccatgttcttcatgaatatctgatccacagaactaaaaggatcattaagcaactaagtattttaaagtaagcaaggtattgccaagttttttctgcataaaatattcaatgtgtatctccagaaatatgagtatgtagagagtcaatatatctattgaatctttttgtgatgctcaggaatcctgtctcattgccaatacatctggagctcagatacatcccttgatatccatggacttaccagcttacatcttatagtgggctctctacagaatccatgaatactgttcttgccgagataagaagcctggtactgccagggacaccagggaagcctggaaataaaaacaaacaagcaaaaaaaaaaaaaaaaaccagaagcaaaacaaaaaatacctctgtatttgcatctgcagcaatgtaacaccgaaatacttaattttgtcaaaaataacagcgtcagccgggcgcagtggcccacgcctgtaatcccaacactttgggaggcggagtcgggcagatcgcctgaagttaggagttcgagaccagcctggccagagtggtgaagcccagtctctactaaaaacacaaaaattagtccggcatggtggcgggcacctgtaataccagctactctgcaggctaatgcaggaaaatcacttgaacccaggaggcggaggatgcagttagctcagatggtgccactgcactccagcctggtgacagaataagactccatctcaaaaacaaaataaacaacataaaaacaaacaaaaacaaaaaacaaaaaaacaagaaaccaaaataccagtgccttgaaaacgggactataaaagatctctacttttgctactaccttctggctcctccagaatgctgccctttctagtctgtagtgccaaagcctggtgtcatggctaaaccctgcacaccaaagcattgtcactgttcacatcttctgcacttaccaggtcacaaatacataagaacctgctatcatatgttgtggccaaacttggtcatactcttcttctcactgccattagtgaagacaattgtctttcccctgtagttcttcaagggaaagacaggatgacaccttccttggtgttacacttgattaagaatggtttattccagattggttttttggggggttggggggcatcatatttctttatatgcactcagttccctagggattgcagctggttgagcagcagagggttcagcagctgctgcctcctcagtgtagctctctcaaatttacttctgtgtcaataacttaactcagtgcagggactgccctgacagccctaactcttccaagcatgcagtattatttatctcagaagtgttgtttaccctgactttgcatgtgaatcttggttagaaaaacctgagtccatttagaaagtcttgctggtaaaacagataagagtttgtattcttcttcccttgatttcctcatgacattttcctattcccttctcagccaccttcaagctttacctaacaataatttatctttatgaagaaaaaatgtgctatctcaccacacagcacagaaactcacatatgcattagtttatatctaaaaaagacacagacataaacctaaagaaggttgtacttccttggggaaaacaaaatctggataaatatttataaaacaacgtgatgcagtataggaaattgggccataacaaaacagtatgttgaaagcttgtggaaataatgcctgaaaaaaattcagtaaaacacaagacttaactgattatctttatttgtattggaccatttcaaatagattgtctgggaaaagcactgagcatggagttagaaagtttttagtcttccaaatcaaattaggaaatagtgtgcccccctttatttttgcagatactttcaaaattgaaattgtctacctctacagaaatgaaagccatcacagattatcctgtctcagcaacttttactggaaagttgcccagacctggataatatcagttcttgtattttcctttataagaaaaaaaaaactatatagctcaatacaaactttccctgaagaacagaattattgtatttcagcgacaatctgttattgtgctgttttctgaataagttgattagaaatgagttgaataaaattcaagggatcctaagttctacatcctctccgtattggtctcttgtgtttacaaagccatgtgtgagttaactaaccccctaaaaaatgtttgacttgtactgcctttctggtctttgaatggtgagaatgaagtgagccacttacaaatgactctacaagttaaaacttctaggaattctttcagccttcaaaggtcagcgttcaaatttcccagtacatttcaaatattagaaaaggacttaccagcagtgctacatatttttgctcgaaaactgtagctaaaattaaattacattaaactcacataaaataagtgaaaaaaggaggaagagagagagataaagaagaccctcaataagtgtcattttggaggtgagaagtatatggcatagagcaacagctggagttatgtccatttaaaccaagttatttctgtttccattgcctgccctttttatttaacaatcatcaatgtggcagttactatatccagattctgttctaaacacttaacaaatattaagttatctgaggtagttacagtcataatctccattttacagttgtggaaatcgaggaacaaaatatgtccaggaagcagagctgggattcaaatctacggatgtgaatgctgtagtcaaggtcttacccactataccgtagtgtttcattcctgtaggtgggatgtttcaatcacagctatgttccagaatgacctggggtttttgttttatttttttaaagtaaagatctctggtcccaattcagatcaatgaagtcagaatctatggagggtaggccagggtatgggcatatttccaaaactctgcagttagtttctagttctaaccagattattttatttatttatttatttatttttatttattttttttgagatggaatctcgcatggctgcctgggctggattgcagtgctgcgatctcagctcactgcaacctctgcctcccaggttcaagtgattctcctgcctcagcctcccaaatagctgggattacaggcgcctgccagcatgcccagttaatttttttgtatttttagtagagacagggtttcgccatgtgaaatgttggccaggctggtctcaaactcctggcctcgtgattcgtctgcctcggcctcccaaagccctgggattacagatgtgagccaccacaccttgccccagattatttatttttaatattttttagttattagaggtacataatgtgtatatattcatggggtgcatgtgatgttgtgatacaggcatacaatgtgtaaaaaccacatcagagtaattggggtatccatcatctcaagtatttgtcatattttttgtgttagaaacattctgattccactctttgtgttatgtaaaaatgtacaataaattattgctgaccataatcacctgttgtgctaccagatagaacctctgtgctccaggaagcttcagcaaagcataatggacaagagcaagggctgtgtaaccagatgatcctgggttcaaattgtagtcatttcccctattggagtgttaactatgaggaagttaccttgctttctgtgtcttggtttcctcacccatcaactgagaagaataataattatggaaataaaacatcatacctacttgatgagattactgtgggttcatattaatactctttcagtatgtttactggcatgtgttaaaaatttaatagttgttagcttaaaagaaccttttgcattgttgtcagggaaatgaatggattaggagaagatctgagctggaataatttgataagttatgatatgttgatgagcaaggtgctgcttattttcttttttacattttgtttcacagcttttaggatatttaaagtcattcctgaaatgcaaacttaagaggtctgtgaatgttgcacatagcaattataaaaatgtctaaaactaacatttgttgagtataatttgtatgtgccaagcattggctaagcagctgacatacattatccagttaaatatttatactgtatctatgaaatagttctatttttcccagttttgccaaaagggaaatcaagacttatagataatgtgtttctcagcatcagatagtggtttctttcctctcctgctctgtccccagcaactataacacatttcaggcttatctcataacaatgtcttagttctataaccaatgcctggattagtcagcatttgccactgttatgctgcataacaaaaaaatctcaaataataattatattttgtttttgttttatttatgcaattgaggcttggctttagtgcatctgaattggttgcagttggctgagtttagcggcaagccaagaatagcttcacaggagcttcatatgtctctcactcttttgggcctatagattattcagtgcatgttcttacaagcacagaagaagtggaaaaggagtgagtacagacctgcaatgagttagggaatttggacccaagctggcccactgtcacttctactcacaattgattcaacattggtgagcagagatgtaatctctgcctctagcaagaggaactgcaaagtcatatcaaaaaaggcagagacagggccaggcatagtggctcatgcctgtaattctagcgctttgggaggcagaggtgggaggatcaccttaggtcaggagttcgagaccggcctggccaacatggtgaaacacgtctctactaaaaatacaaaaattagctgggcatgatgtcatgcacctgtaatcccagctacttgggaggctgagataggagaatagcttgaacccgggaggctgaggttgcagttaccctagatcacaccattgcactccagcctgggcaacagattgcgactccacctcaaaaaaaaaaaaaaaaaaaaatggctgagaagccgagtggtaatgaatggccaaaatttcattcactttgtaagtgacatatctaatcattgaaatggaaatatctcttattacacaactgagtttcacttgtgaaattcttcttattttttttattttttattttttggctcttgtcccccaggctggagtgcaatggtgtgatcttggctcactacaacctccacctcccaggttcaagtgattctcctgcctcagcgtcctgagtagctgggattacaggcacctgctaccatgcccagccaacttttgtatttttagtagagatggggtttcaccatgttggccaggctggtctggaactcctgacctcaagtgatctgcctgcctcagatttgcaaagtgctggaattacaggcatgagccaccgcgcctggcctgtgaaattcttttattgagaacctaggtctgataattttgaaaggctgagaaaaatgaaaaaataaaatctcatggcctttttttctccttgatctactaaagttaaaattaataatcttattacttttaactaatttattgaatgcccaaattctggagaattgtcatttggtaattcacatgattacctatctacattaggacaaatttactcacattaggcagaagcaattctacacgcacatatatactcttactttgaagactacagtcatgataggctatttccatttctattttaaactttgtaaccaccagtgttataagctctacttacattttgaaaatcaagcttgcattattcaattcatagaggtagatcactctacctgcttcttacgttatgtcagtggagatatacagtctgccctccatatctgtggattccatatccttggattcaacaaccagagatagaaagtatttgggaggaaaagaaagtccaatttccaagaagcaaaacttgaatttgctgttgaatcctcatgaatgaagtaatgtgtaggcattgcattaggtattacaaatcatctaaagatgacttaaagaagatgtgtgtaggtaatatgcaaatactatgccatttcatataagagacttgaaaatcttcagattttggtatggggagtgatcctggaacaaatcccctatggattctgatggataactatatttctttttcatttttatatataccctaatacatgtacaaatatgtcggaaaatgtttacagaagaaaagcaagttagctctaaatgaatggtcaaagtaaaacttcgatatttttaaagaaaattataaacaagagtgacatatatataatccttaattaaatagggaaataaatctggtaaaatggtggagaaaacattgcagctcaaaacctgatcttattgtttccaattaacaaagtaatagttctttggtaagttgctttattccttattttgcatatatgccattctcaaaatttaggagattttgagatttccccaaagccctcaaattttgtaaaaagggagattttcacatatatttaattcctccagataatctcagcatgaataagaaaggcccacaagatgctttactgtttcccttaaagccaaaatgcattaaaaatcaaagggctacttttgataagaaatttactttcttattttcctttttttttcgagatggagtcttgttctgtcacccaggctggagtgcagtggctcaatctcagctcactgcaacctctgcctcttggcttcaagtgattctcctgcctcagcctcctgagtaggtaggactataggtgtgcaccaccatgccagctaatttttgtatttttagtagagacagggtttctccatgttgaccaggctggtcttgaactactgacctcaggtcatccacctgccttggcctcccaaagtgctggaattacagacatgagacacccagcccagcaaaaatttcttttccataatgattcttcctctttaaatgtaacttcttatgtattgaaaagttggatttaagacccaacatctgaagctctatagctttccaaattagtaaaaagctgagcaagaatagtgtttttaaatctccacaaaagaatcaatcattctagtaataaatgtcaaactctctagtctttaattcttgtaagagaagattatttgatgctagaatttactagataatctgatagagtgagtttttatgtgtgactgactcaattaatccttattacaaactcacagctttatactaaagaatcatccataaagaaacttcttaacggagaaaaggcatggctaggccatgactgatttagacaaaattttcatgttggtattgatccattatttttttcatgaaggaaaaacaggcacatcattctaatttgagatcagggacactcacattggcttctgcttgatacttagattaaattattctcctaccttatgaaacagaatttgtttgatagttcaacaaaaatagagttgggaagacaatgaaagtaaaattaaattgaagaatggttgagatagttcttatttcatttctgcaaatgattttggacaaatggaaagaaacttggaaactgtacactgtcactttgcaagagatctcatagaggagtgcttgatttagattctatgggatatgactctttaaacaccagtgctcttaaaatgccacggaatatttatagatattattagaataaaactatatatgtattttaactttctattgtagaaaatttaaaatatttatgaaagggtaggcactagtacagtgaacccttatgtacatttaattcatgctctattttgtttcatatctactcccaatcacttctgagcacagatattttagacaaacctgagacatcatatttatccagaaacatgaacttacagacatcaatatcactcataaatatatttgtagatatttttcaaaggtaagggttctcattaatataatcacaatacttgtaatagctaacatacttattgtcattaacataaggataacttcttaatatcatcaagtacccagtcagtattcaaaatttttaaattgtcacacacacacacacacacacaccctttattttaaacacaattcaggaaggtctatttataatgattagttgagatttctcaagtgtcttttaatttatgagttcatcctccgtgatttattgtcttatttgtaattgatttattgatgaaactgagtttgttccacagttttccataaactggattgtgctgattgcattactgtgatgtcaatgaatggttttatttgttctctacatttcctgtaaattggtatttagatcttgaggcttaaggcttgatcagattttgggttgactctgggttgactcttttttctctttctctctttcaaaaatactttcattaggagagacatgatgtctggcccttctttgtatgatacaagcagccattggtgatcattgcctagctctacttttccactagggaaaattgtgcttgtctgatacaatcatgctttcatcatctattaagtcaaatagttctctaagaaaaccccccactcttcaacatcatgggtacctcacttatggattttatggaaaatcaaggtaaaaagtttttttttttttacttttatttattggttttcaaaataagtcactttcctagaatcctccgaagatgtgccttctagattttttcttttatttctatcactgtttactcaagaatttaaacacagtttatatatttcagtttagtgcagttattgtcaatttcaatgatcgaaatgactcagctttggccaagtggagctgtaatttactcctgtatacttttaactccacagaaaataatacttgaaaggtttcttgtcttctatatgacaaaagatacttaatgtgcatctcctgcattttctgccttagacctaatgttaaatatttgcaaggtttcctggttccttttaccattaaataaaagttggagacaaaatcatggttaaatattgccagtgggtcagtcattgttcctgtgacttttcagtggatatagatgggttacatgcatttttatttccagttaaaggcttcgtaaatttatattgatatttctcattcaaactctgtatcaaggttattacttaacctcttccatcttccatctttatttcatttcttccatcccaaaatcacagttgtcaaaagtgccagaagaattattcatttcttttagccataaggtacacactattgtctcagaataaaaataataccactcacaacaatatgactgagaatttaaaatacttcttgcacttgcttttgtccttatcagcatataccccttatgaaatacctcatttgatatatacagtcaaattatggtgttttatgagcatttggaattgttcctctttaatgattatgacaccaacttgattcacaattcatacacctgtttggttttgcttctgttttttaggaattttgtgaaaagctaattctgttttgaaattatggaaaatgcacctaatttcaaggaagatctatataacaacatacatattgagaggagtttggtttctatagctgttctggttgccctgttgcctttctttccttatacataaaaagtttgttttaatattacatttaacgttactattttgtaatgttttctggaactatctctgtaccatctctttacacacaaacatacagcacaaacatatatatgtttatattatatttttaaatggtaaaatattacatacacttgcctcaatctctttttcacttagccttacatgctgaatatcatttactttattgtacacagagatatctcatttaatttttccagcttgattttctcataattgcatttcatggatatttcatagtttagtcaatgagtcccctgtaggtggacatttgggatgttttgagtattttgttactataactattggttcattaaattgcctttgcataattttgcctaaataattttttaatatatggccaattcctctccataagactagtaacagcttacattcccaatagcaatatctgagaattcattttcttaagctttgtcaactaagtcaattatcaaacttttgagtttttgctaatctgagatgggagaaatctatctcagtgaagtattaatttacatctatcttattataaatgaggtttagcatattttatatgtgtaagttcgatttgcatttcttctatgaaggttttattaagattcccagcacattctctctaagtacttgataattttccttccatttttaaaagctgttagactattgtaaatgttatttgtaatacaaataagcattttctgcagtttgctgttttaacttgcttctgatgtttctgctgtgcagtttcttttttcagttttatgcaattaaatgtctgtagctgttttctttttagttattttgtaattaataaataaaattatatgtatttgtcatgtacatgatgttttgaaatatatatacattgtgtaatgactaagtctagctaatttatatatacaatacacagttaatacacatagttaatgtttttctggtgggaacacttaacatccactgtcttagcatttttcaagtacaacatagtgaccatagtaattaacaatatattgcattcagttttcttttggcttttcaattctgtgtcatagttactaaagttacctcaatccctgattatgaaaaaccactcatgtacaaaggttgattttatgaatacttgacctcttattttataccatgaacttattgggaagagcataaagaggatattatatctaaatttctttcctgtatctgctaccaaccagctctgtgagcctcaacatactgccaaaataaactgagacctctaaagttggattaactattagctgtcaccacagattattattagggtaaattgagaatatatttcagagatgacttcctaggcacagtaagtttgtataaaaatgtttattttgaatttttacatatgattttcttatataaaatcattttctggattaggctcttccaaaggtaagattgagttctggctcaaaatttaacttatcacactataaatcaaagcttattcctttatcaccactgaatttctacctttcagctcttcagtaacaaaaagtcagtatctgtttttttttagaataaattagttttaagtaacaattaaacaattattctcttttcagtatctcagtacatacaactacttgttcttcttggaaacatcatactttttctcacccctagacattcattaatttattcaaaacttttcttgaatctcccttttgtccagggacccagagctctgctgcacccagagctcaccatttctaccatcatatttagcccttgatgcttcctctgctgaaatgtacaatgcttgtcctgccttgcaaaacactatttggtaattttcagtctctacctgttatctctattcaatccacgatgttccaccaaataaagccgtttccaacaccaaaaattaaaaaagaaattaaccttttattgatttataacctattacaaaaaactacaaaattcaaatatatagagtcaaatgaatgttcagagttgacaaagctgtgtaatcaaccaaataatagaccattaccaacacctgaaacttttccacgtatgctcatgccagatgaatacgtttcacaaaagtaaccattatccaacatcaaaagaccttagattgtcttgctttccactttttttttttgcttttgctttttgaagtttatataagtaaaatctcatagcatgtgcttttgtttctggattattttccagtatcatattgttgattcatatttgtttctagcctgggcaacatggtgaaacctcatctctataaaacattagtcgggcttggtggcatgtgcctgtagtaccagctactcagtaggctgaggtgagagcctaggaggtcaaggctgcactaagccatgttctaagccactgcactacagcctgggtgacagagcaagaccctgtccacatatatatacacacatacatattgtatatctgtgtatgtgtatacatatttattttctttctcttcttattgattagtaggaattatttattctggacatgaatcaaccacttgtccatgtatgaacgtatatgctcccacactgtggcttccattttcactttcttcattgtgtcaatcttttcatttagatattttacaatattttcttcttgaaacttgttacatttaaacttgacatccatgtgaaattttatttttggaaattaaatttgattttgtttattgtgtgaggatttttaacagaagagaaatctctgtaaaaaggcaaaattgtaacgacacaatctgccgtgcacgcttggcccttccactctactacctaccatctcccatttaggacccagctgcagaagataatagaagtcttggaatttatccccacatgaaggatgtggcttacacagcttacattaactatagtattaatgactcctggtcttctacaacccagcaaatttgcttgatgaccagagttttcagagttaataagattaattataagtgacatttatgattcatttatatatgttagaaagtgatccaaacaatttacagatactaaccaatcttttttaacaattctttgagataggtactactatatccattttacagataaggcattgagtgattaagtaattttcaatagtctcacatctgatatgtgtgaaaacggagatgtgattgtatgatatggactaaggctgccacactcagagctgttagctaccaggcagtagttttgttctttactacgggttacttcggaaccttgctttaaaaaactgatgctatgccatttagagccatgaataaggtttatcttccttttacatcataaactcaaaaggatactttttccccctctcaatggattatttattccaagccacctcttaaagagtgataattaagttatttttggtcaactaatcttccttagggagatacatttaaacattcagaactgtcttattttgagtttgtgttggccagcacaaacttacttttgcctttgatgcacagtatagtttggatcaaaatattccaaccatattaagcccagttattgcttttattttcaatgtaataaacatcttgacaacattctgcaaagaaaataccagcttcaccttttcatcccacctttgtcattctttcaaacttcaagaatccattaataaacattatttatgaaataatatatatatcaatgaatattttgaaaattcactcaaacatcatctctttttttcccactctctctgaccctacagccaaatttctcagttttcaatagcaatttatgcactttctctacagtacttatagagggctatatcacttaacacattggattacagctatttcatttacccattttcaaaggatgtatgttaaagaccagggctgccaccaggccactaaagcatgtttgtctgcaggcaggttattttttgcagggagcttgattatataaaccatttgatttaaaaatacattatgaaataatggacccatgtgaagtgtactgattgttggtacatatttagactcatgggcagagaaaaagtagatatgtatttgtttattgtcccatgaagacttgtagaggtttttcctagactccaggtaccttctcttcctatttcaattcaagaaccaactcttcatggtttttttttattgccaaatgtgctgttcttgcctaatttcatattttctacctctagaaagaggttgcaattttgttattactcataattccatggctctttgtgttaatattgagcgaatattgatcttgcctctgcagctccctaataccatttatttcaagtcaatcacaatattactcatgacattgcatcattctttgggagtcctgtgaaggtttccagtgactctcaaaagttgttactggccaggtgtggtggctcatgcctgtaatctcagcactgtgggaggccaaggcaggagaatcacttgggctcaagagtctgataccagcctgggagacacagtgagactctgtctcaaaaaaaaaatttaaaaaaattagccaggcatagtaatgcacacctgtgcattgggaagtgctactaaggagctaagtagctactaagtgctactagggaggctaaggtgggaggattacataatcccaagagcttgaggttgcagtgagccataattgtgccattgcactccagcctgggtgacagagtgagaccctatctcaaaaaaaaaatagctgtcataatgcatttctatgcattgtcataaaaatatacatttaattagagaagaaaaaaaatccttctccagagtactatgttaaaaaatgtgactgctggccaggcgcggtggctcacgcctgtaatcctagcactttggaaggccgaggccggcagatcacgaggtcaggagatcaagaccatcttggctaacacggtgaaaccccatctctactaaaaatacaaaaaaatagccgggtgtagtggcgggagtctgcagccccagctactccagaggctgaggcaggagaatggcgtgaacccgggaggccgagcttgcagtgagccgagatggcgccactgcactccagcctgggcgacagagccagactccatcacaaaaaaaaaaaaaaaaagtgactgctaacaatgcaaacattttgtacttttttttgtttttctgagactggatcttgctctgtttcccaggcaggagtacagcggcacactcatacaactcactgcagcctcaacctcctaggctcaagccatcctcccacttcagcttttctagttttctagtagctgggactacaggcgcacaccaccacacccagctaatttctctatggtttgtagagacaggttttcactatgttgcccaggctggtctggaactcctgggctcaagggatccacctgccttggcctcccaaagtgctgggattacaggcgtgagcctctgtgccctacctgaactaacttttaaaaacaggtctaaacaatttaatgctccaaaacgaagtgcttctttttttccgtcttctgtcaaaaaaacaaaattacaataaatttagttatagatctaattggattttattcccaattcatgaatctggcagcctccattctgcaaaatagaatgaaagctctcactgaacaatagcagaacaatgggttttcatatggtaggaataaggaaacaaatcaatagaaaaaagctgactggttaatatcaagttacttcatgttactttttttaagagtaaagaagaggggacttcttattagactgactcaggtagattggaatctcctgttttcaggaaaactgttctgtttgtggatctatctgcttccttacggttttagtttgactatgtggcatttagcatgaatgactgcattttggctgggtctcgtctgtttgggcctaggagctcattctaaaactacagcctcatatactttttgtttagtagcatacattagcaaaaatttatttttcagtaaacatgacccatactaaaatgaggcttcattttttgtaatttattttgcttaatgtgagtattaatgctccttaccgcacaaatactaatgaattttagtatggggtgctactctaactgctgtaggggcattgcctaatatttggtatatgccccatatttattttataaatatttataatagtctgaattctcaaaaccacctattcccagggaatttgggtaagagattatagacctgtatcacttttttatgaaaatgagatgccctaattgcttggtgtaagatcattaaaactttcatattaaaatttatatctagaatatctaaatatttgtttatttgttatagctagaagaaaaaaggaaacactcaactggcatctagcccaaaactattttttgttccaaaatgattttgaataaaataagatttatatattatcacatttaaaggcactaaaggagaaatgttgcagttattttggtgagatattttgctgagattatatggccatacactaaacttattcctaatgaatatcaatcattattgtccccttcagcaagtattggtctccacttcacattagtcaatatttacccactcatttaatagagtttgatatttgtctccacagtaatcaatatctatttaatatttaaagaaggaacaaaagaagtaaacagtacatacaaaagatgtttttctgaattattcatctcctatgaaaccgtttgtatttaacttagtttttccatatttatcattaatttttaaattgtatctcattatattgaactccctaaattttccaaacctttagtcttgtttgggattttgccatacctaatatttattgtagggagcaggaaatagacaccttcaatgtccaggatattgacactcaaaaaagcaaaattttttgttaaccatagttaataaactctaattaaaagtggaaatattgatgattaccattattgtcaataatgaccactaataccgaagacaaatttacataaaatgtgattcttctcagtataaatgcgatgttaagcgcataagcgaaagattgctttctatatatctttagtaccaatgttgtaaattcacaagttacccactcatacacaaatgcacacactacacatacacacacacacatacacaaacacacacaactttgttgatgtatctttctaaactttagaggtttaaactatggttactttttaaaacagagtttaactaaaatctttcaaagaattattaactaattaactaaactagttaatagttaatagttaattaactaaattaactaaattattagctattaactaaaataattcaaagaataatttttaatcaattactgttcattactcaggtttaaaccaatagcaacagcatcatccaaccttacgtaacaataggatttcaatccaataaagcttgatagaataaatacattactaagaattattactaaaaatttaaggaggaggggtagtcactttcatacataaatacttaattttatcagttcccaagatgattctcatgcattatttaaaattagagttataggccaggcacagtggctcatgcctgtaatcccagcactttgcgaggccgagccaggtggatcacctgtggtcaggagttcgagagcagcctggccaacatggtgaaaccccatctctactaaaaatacaaaacttatctgggagtggtggtaagtgcctataattgcagatacacagaaggctgagacaggagaattgcttgaacccagaaggcggaggttgctgtaagccgagatcgcgccattgcaccccagcctgggagacaagagtgaaacttcatctcaataaataaataaatacatacatacataaaataaaataaaattagagttatagagttccatagtaaatatctgaaaatccatgtagaacagtagcctttatttctcataactggaagaatagatggtattgtgttacagggaaagtaaagtgactcaaagaagggaaaaataacagaaaaaaccttacctccaaaactcagcagctcatcagtaaggctgttggcaacaatatttttattccatataactctacactcatctgatcacaactatagtactgaattcagttatatgcataagttaatgcttagcttgaaaagacagggaatagtgggagaacaatggagaggaaactcaacatgctagcttggaaatataaatggtcatgggtgactgaactgtacttacaaaattgtatgcgtttttcaaatctgtaaagtgattggggcccccaaaattatatatttcttaatagccatggcaatttgctggatcacagacctaattttctgccttccttgtggtaatcactcaacacttccctttccaatattagtatgttgatggcgattaattttcctatttttaccatttctaataaatcctttgttgaaagtttttctttatctgttttgacagctcctgagaagtttcctgtcaatttcttggctgatcaagaatcttcaaagtagaagcatttctaaccattgattatatatcttcagtcttccaaaatattatttccctctttacatttttgttatcctcctttgaaaaacagaatatgtactcacaaaaaataaaaacaaaaacacagaataacccccaagaacataagaacaactttaccaagtttagatgaaacacctttcttatcaacttagttggtgctcagattagtgcctaaaatgtttaggcaagtgcctgacctcattacccattcgccaaatgaatgaatgtaaaacactgatctctatcttacccttaaataaagatgagttccttctcaggaaactcccttaagccctagatattggtgcatcatctgtgtctcatccctctctttttttccaagtttgtttactggaacatttctgggcaaacccatcaacccatctatatttatttatttttcttgtgagaattgaatattttgataaaaagtaaattctccatgccagccttgttcttggaaagctcccaatgtagacatgcagattagtacataacttctgttgaatatgtatagaatgtgtagaggaaatgagggaacgtctaaactgaagaaaagattcagtagggatacggttattcttgggggtggacttttaagatgtgtcttccacaaaaggaattaaacattgttttagtaagggtacagaagtagagaatcaaggctgatcatcttcagtaaaagcttcaaaggcatagatttatggtaaatttaataaagaaattccttatagttaaagcttttcaaaaattgtggaaattccaacagaaggaacatgatggcagtgtagacttttataaaatttccttataaaacaaatagaacaaatgaaatatttaaaaataaacatgagtgatattttgaacaaaatctgataaaaaaaaatttaccaggaatctcagaaaaaggtagataggccaaaaatagcaacaggctctgcacaataccagcaactatgtaatagcagggtcaaagtaaaggaagtaagaaaggaatggcattataagccaacaaccactcacccctatgggaaaaaaaaacacatgcagagtggtaatccaagaggacaaacttgacaacaactagcagaaagcacaagttgcaggtgaagtataaaatagcgaaggtgaattactggacaaatatggaacaatctagacattattttcaaaaagattgtaattcatttaaaaaggaaatataaaaatatccaggagctcaaatggtagcctacattctccgacaaggagaaaaaggaggcgagagaggagataaaaatgagaggaacaaagcatcactcatcagacaccactgaatgttgttaagacaaccatttattaccctgaaaatttataactaatgggaattagacaagtatctctggataaccaaataggtctagcaaatgcagaaagttattctattaaaagcagagtattttagataataaatccacaagggaatacagaattgaaatatagaattacagaattaaaagatcacaattttacagtccttaactaaatacaatcaatagatgatgtactaggttgtgttatgtcaacatggctaaggctaaaactttgcttgctagaattccctcctttgtatgggacgatgctggagttgagtatttgtgcaaaattaaaaaggcaatgtgacacaaaaactactaatttcagagaggttttgtggttagacagggtgacagatgcatgatgcctggaaaaccatgcatgtcctgcttctcctctgttttgtattcagctcacctttctaattgctaacctggtagtcaacagtggccccaaagtcaccaaaggtgagaggtgaagccagctggacttcctgggttgggtgaggacttggagaacttttctgtctagctaaaggattgtaaatgcaccaatcagcactctgtgtctagctaaagatttgtaaacgcaccaatcagcactctgtaaaaacggaccaatcagcactctgtaaaatggaccaattggcactctgtaaaatggaccaatcagcactctgtaaaatggaccaatcagcagtatgagggtggggccaaataaggaaataaaagctggccacccaaactggtagaggcaactgcgctcaggtctccttccggtgtgtgggttgtttgttcttttgctcttcgcagtaaattttgctggtgctcagtccttgggtctgcactacctttatgagctgtaagactgactgtgcaggtctgcggcttcatttctgaagtcagcaagaccatgaacccaccagaaggaagaaacaaactctggacacatctgaacatctgaaggaaaaaattccggacacaccatctttaagaactgtgacactcaccgcaagggtctgtggcttcattcttgaagcaatgagacgaagaacccaccagaaggaaccaattccggacacattttggcgaccacaaagggaaaatcgactatcaccaagcggtgagtaccatcggacctctttggcttgctattgtgtcataattttccttagaatttgggggctaaataccaggcactggtcggccagttaaaaagcagtccaaaagaaatgtaatgcaagacacatacgcagtttttgttttctataaaacacgacttaaacgggtaagtgatgctgactaaattaattttaataacacattttaactcattatatacaaaatattgttttatcgtgtaattaatataagaaatgagatattctatgtttttcataggtctttaaaatgcggtgcgtcttgttcactcacagcacgtctcaatttagactacctgcattttgcatgctcagttaccacctgtgcctagtagctaatgtattagacagtgctagagtagttaataactaaagagtagttattaagtaatattgcttaaacaatttgtatcttacatataaataaacaaaatactagaattataaattcatcccaacttgtcgtaacagaaaacatcaaccataaaattttgcttagtttgaaaatactactttctttgaggttcgacttaggctacaaaaaacaagaaggaagagaaaacaagacagtaacatttatttactgaaccatgactataatggagttctaggcacattccattccatgcttatggcaatcccatggtgcagttactgctgtgttcccattttatagctagggaaactgggttttaataaggttttgtaatttgctgagatcacacacctagcaagatttggggcagctggaattctaaacttacgtctgattaactgtaattctcagagaatttcctctgtgacatcagtgaaaaaaatcattttgtatagaccagaataggaaaaaaggaaaagaaaaagtagaaatatttatttatttattttattttaactttcattgtaagttcaggactatgtgtgtagatttgttatgtaggtaaacctgtgacttgggggtttgttgtatagattatttcattaattttagattgagcaaatgatagtgataaatcaggagacagagcataaagccttttcttttacatcactttgaggttcccctcagtttcacagaatattttttcgcctaaaattttcttcaggccatgtttgtgtgtgcaggaacatctctaattatggaatttactctatgttaaatttagaatggcttaatggatggctctctctaaagcttgttactgtttacctaaggtcatcacaatattaatggctttttagaaaggaaactgtgtaagactactaataagcaccatgttttatgcatattttatgccagtcacttaaaatttataatttatgttgctagaacatttattcaatattgatagcttattttatgccacttctagttggtattagaaatgtattaaatggctaaaatgcgtgtgccctttctatcaatatgcacttaatgttaatgctttctaaaacactttcggagtaataataaccaccttccattcaaaatcatttataataccccttaccattagctgaaaattcatcaaatgcaatatgttaattcatcaacattattgtacaacgtatactgagaagaaataatgtgacggtgtgctccacaaattaaaattgtgactttaggattggatattatttctatcctctaataccaagttggtgagccagggaccagtaggagtacaatttgcgctgttacttgaatcctttatcttttggtgaacgcaccactgtcacaacaacaaatagcgtgacattgttttttccccaaatggtagatgctttgatgaaagttaatcatggaaaaagatgaaataaactgcttagaagtatgtattaagttatccccaaacatagaaaaccataaagaagtcttaagtataagcaacaaaatggctatgaacttgtgaaacaaaagggaacatgatgtagccacagtgtgaagtagaggcagggtgtccaaagaggatgttatttgagctgggccttgaaaagtaaattacttaatggatgagtgcaaaaaagccatcgagtaagagaaaatagtatgtatatgaaaaaataataggctgatttgaccaagaatgaaaactcttaaatccatttaaaaggtaaaggagagggaaggaaactagggataaagctggatacttaggttgttacccaaaagaaaataattttgtgtgcttcactaggcatttattctattggcaaggggatgaaatttgtagttttaaaatatgtgactaacatgctgagagctgtgtgtttgtatttatgataactgatgatgtggaccacaatgtgttggagggaggacagatcaaatgcaataacgcagtgaggaatggtcaggtataaatgagatgtacttcatgatacgtgtgatgtagacatacatatcatgatccagctattagcctctttcatatggagtcatacaaacattactttggatatataaatcaatttcagttaggtgggttagggaaaataaggtccatttattttttgtctaaacaatgctcattgttctttataatgttggtgacaatgacaaaaatgagaaatgtaaagaacacagtatatttgtgtgtaggataaactgcttatgctgagagcagctagatttctatgccactgttgacattttatttatcacaatcctgcctaaacacgaatccactttgaattaattgcttccaaaactatatatttaaatgttgaagctgtagtgaaacaattaactatgtgatcatttatcatatcatgctttaatgccaataggacattatgagcaatgagtatttatcaatgttctaattgtagctgagtagcggtgtaccgctgtttattgttatttttaaacagttgattttaacacccggcaccctacaattgtccggttaatgtgttctgctttgggatcaggctgaaattgaaaggccaaaaattcaagataattccacgataaacagctttgtgatcaaaagttagggtgatatgaaacttcaacctgccataaatacaggacaggttttcttaatctccacatcattgaaacattggcatggataattcctttctgggaggagtttcgtgtccattctaggatgtttagtagcatctttggcttctacccagtggatgcctgtagcactctcttataattgtgacaatcaaaatgtctccagatattgcccagtatcgccgccaatattagctaatgtaaagacatcgtttaacttgaaagctgcacacatgaagtaacccaccgtgtgttttaccacaaatttttaaatttttaaagtaagcagttgcaaataaaattattggagatcccctaaagtacgctagacagaaaaaatcataaacatatgggtatatattttggctcatcagtaaaagtattcaattaatccttatttctacccatttttctgagtcactggcacaatttactatcttagcgtaaccaaaaacacgtatatttttctttgtaaatcttttgctaactaagcacattctatattttcatattcaaattgattgttacagaatataaattcatattagtgtacaacttctatgccctctaactctcccatttacacagtgttaaataataacttgttttcccttcatctggcaggaggtaagggttaaagtttgaaaatccatgcaagtccagactttatcctaagaacttcatataaaagctataaaatctaaattccctttttcaaaagtgaaaaaaatataaattatattatagagtaatagtggagtgaagaggaaaataagaacggtccattaaacttaaaaaaaaaaaaaagggaatggggacccgataaatagggaagaaactatggggaatgtgccttagtggaaacaatatcattttcaaatcctaaatctcctgatttctagtcaaacttctggatagtttaatcaaattttctagatgtgagtattctttactaggggatgctatcacctactttcagatttgattctataattaaaataacaatagctttgttagtaacttctatatgccacagtaacttctatatgttctttaaatattttattaatattaatgacaatccagtgaagtgaatattattatcatctctgttgaacagaataagaaacagaagaaggagagttcacacatagatttaaatttagggctcatgcctgtaatctcagagcaggcgaatctgttgaacttagaaattggagaccagcctgggcaacatggtgaaccctcgtctctactaaaaattaaaaaaaaaaaaaaaaatagccaggtgtggtggtgtgtacctgtagttccagctacctgggaggctgaggtgggaggatcacttgagcctgggaaggtggagattgcagtgagccaagattgtgctgctacactccagcctgggtgacagaatgagaccctatctcactaataatagtaatagtaagaagaagaagaagaatctgactctaaaagagtaactccaacattataatatgctttcacaaataccctaaaaagatgtcttacgtgcagtgggttagcaatacaaaatagctctctgccttcaactaagaaaaatatgtgaagaaagataaataataatttacctaagtgcatgaagaaactcagaaatagaagcaggaacagagtacaggcctgctaataaatatagaaaccgaatgtactatttctctcttcctcatttagctacctaatgtcttgtgattttcctattttttttctactgctttgagccctgccttagttcacatcttcataaatttttgctcaagcctgataaagtctacatattctgctacaaatttctaaaaaaaatctgatcatgttgatggccttgcttaaatatccttcaagagtttcctttggcttctgggataagtctaaattcttctcttcatttagcagtatctagttaaattcaagatttgcatactcttagaatcagtgatttcacactcaggtatacattctagataatctcttgcacatgtgtaggagatatttgcaaaatggtgtgccattgtttgtaatagtgtatgatctaaatgccatattgtaggacaataaagagaaaaattattatattcaaataacggaatactatacagtatttcatttttatttcttagttgacaaatgaaaattatatatatttatggtgtacaacatgttgttttaaaatatgtatacattgcagaatgtctataccaagctaattaacatgcattatctcatacatttgtggtgagtacacttaaaatctactctggtagcaattttcaagtgtacaatacattgttactatattcactatgttgtacgatacatctcttgaacttatttctgcctggctgagtgaaattttgtatccttagaccaacttcaccccaatcccctccacctccccagcctctggtaatcaccattccagagtctgcatcaatgacttgacttttttagattccacatataagtaatatcatgtagtatttgtcacttagcataatgtcttcaaggttcatccatgtagttgcaagtgacagtgtttccatcttttgtaaggctgaatagtattccatagtgtatgtataccacctttttatacagcattttaaatgagtgtcttatgcttatgccagaatacagactaattttaaaaatagaataattaaaaaaaatacaatatgatattatatatcttctacaaataaataaaataatgtatattgtttaggattacactgctcatagagtaatatttgggataatgattacgtgtggtgatgaaaagaaggtgaatgaataattttacatacagggagctttaagtatatttttaatttatttttaagctgtttgtcggttacatagtgtttatcatatgctttagatgtttttgtatgcttcaagcacttaataaaaacttaaatcatctctacaaaagtaaataactataaataagtctgtcaaaaaggtccactattaatctttacatacttttccaatattatggacactttattgatctccagtcatgatgaaccatgctgcagttttcctaacatgtcattctcttttctgtatggccggttttacactataagaactttccattcaccttactcctactaacttgtcgaggctcagctccgagctctcaagactccaggacccttatttgaaatctttaatttgactattctaatatcttatggcaccatttctacatttgtgtcagccctgaaacaatagctgtgaactctgctcacacgacatagccagtggaggttggcaagggggctctgcttctcattagccactcaggatcccaggtgatggaggctacaacaggaactgtgcttacccaatcactgcggcaggaaagaatggtggatcatgatctgtttcttagggcccctatgcagaagtgaccaaaatcattttcattcacattttttttgaatgaagcaactcaaatgacctctgctaacttcaaaggaaatggaaaaatgcaagccctacgagatgactaaatggtgagaacagctttgtgtgaaatatgtaaacagccctaaagactcctacagtctatacatttctcatgttgaattgtaatgaattatttactcctcctgtgtggacattttatcttagtcagctctgtatgtcggccactgataccatatagacacatttaaaagaatatgttttgcccgggtaagagaaaacatcctctctcagagaacaggtccccatctacttctagatgagtccttcagaaagtaatatctgtgggtgaacattagcatttcattattggatcattttttgatcatatcctgcttgattgactgtaaggttatcaatctatgaattttcagagctgaccacatttagctcagtcttcccacaaaagaagggggaactcagctcctactcacttttatgtacctgacagacatttgctgaaaagtgacaaatcagcccagcctattgcagtggtctgtcattaaaggataggaaagccagtttcttcagtttccgaggcacagctattcactataaaaatccacacttaaaaggtttttctaaggtggttgctcattccaaatcataaggaaccatcctccttgaattggtttacctatttatcatcaaaacaataatgttattaaaaatccaatttttcctaagacttattattttcaaatctatttccttttgtacatttctttgaaaagcgatattttagcatgttgagaggtgggaaggaatacatcatgtttttcctttttttattcctcctttcaagttatatgcatttttgtattgtactattttaacattctagggaatttctagaatttggactaagcactcttgtcacagatgatcttgtatagaatatcatattaaacataatttgtatcttcactttgaagattaaatgccaatctcatttatgaaaatgcaacaggaaagtatcctaaactctcagtatttacgaacattttcacatgacctctctagcaacaaatcctgttagctgtgccttagaaacataatgagaatcaactactgctcacagtcttcagtgctccttgtggttgaggccaacaacatcaggactatttcaagtctcattccgcctgttctttctacagtcttagtgctcctttaaaaatgcagttcaggccacgcgcggtggtttacacctgtaatcccagcactttgggagaccgaggcaagtggatcatgaggtcaggagtttgagaccatcctggccaagatggtgaaaccccatctctactaaaaatacaaaaattatccgggcgcgatggggggagcctgtaatcccagctactcaggaggctgaggcaggagaattgcttgaacccgggaggcagaggttgcagtgagccaagattgcaccactgcactcaagcctgggcaacagagcaagactccgtctcaaaagaaaaagcagtttattaagatcacagtcaggaacagaaaaccaaataccatgtgtttctacctataagtgggaggaaaacgttgagtacacatacacataagatgtaaacaacagacactggggattactagagggggaaagaagagaggaaggcgtggactaaaaaactacctattgggtagtatgctcactacctgggtgatgggatcatgggtaggtaccccaaacctcagcatcaggcaatacaccatgtaacagacctgcacatgtacccgtgaatctgaaataaaagttgaaattatttttttaaaaaaagattacagtcacatgaattctctgcttaaaatccctctgcatggcaatagggtcctccattactgagcttctggctaaattccccacctcccaacattctcctgcccttacttcgctttcttgttttgcattcagtgcagctttgactttcgtgtcagggtgtttgtagctgttttccctacctaggtcactttcccccttatagcaaataattaattcccactcttacagatctttactcaacattcacatttttcagaggagactcctcagataacattatctgaagttaaaatatgacactatcccttatccaactttcttttgattctctttattatcatctgatatctcacagttgataagtgagtacaccacatatatatacatatacatacacatataaacataaacattatttgcatattctcagtaaaatgaagattatataagggaggactttttaattttgtttcgttcaccagtacatagaagagcatcaagaacattataagtgtttaaaaattatttcttgaggcctggcgcagtggctcactcctgtaatcccagcactttgggaggctgaggcaggtggatcacgagttcaggagatggagaccatcctggctaacacggtgaaaccccgtctctactaaaaatacaaaaaattagctgggcgtggtggtgggtgcctgtagtcccagctcctcgggaagctcaggcaggagaatggcgggaacccgggaggtggagcttaccgtgagctgagatcgcaccactgcactccaacctgggtgacaaggcgagactccatctcaaaaaatatatgtatatatttcttgaatgaataaatgattagataaactcttacagagtagtagatggatcacaacttcattctcaagaaatttctgcagtcttttgtactgcagtgccttacatttataccagttatggcaaagaccaaagttgcaagggtaccagggatataatttcattagcaattattttttatctatttatttttatgagacagggtctctctttcagtcgcccagctgcagtgcaatggcacgatcatggctcactgcagcttcaacctacccaggctcaggtgattgtctcacctctgcctcctgagtagctgggactgtaggcatgtggcaccatgccgggctaatttttgtatttttttgtggagatggggttttgtcatattctcacactggtcttgaactccctgagctcaagtgatccacctgctttggcctccctaagtgctaggattacaggtttggaccactgcgcctggcctaacagtctcgttttaatcaaacatctctcctatgctcagggcaccaattgggttccttcatttttcttccttattttcctcctcccttcttctctttcgattgtacttttcgaccttttttccccttccattctaatcattcactatggactttaaaactgttgagattctgtggtccagctcactaagtccaccttctcaggaatgtcgtttctctctatgtagcacagtggcactctgagctgttagtgtagcatgaacatgggttgtagcctaaaatgctgctacctcaccactgtgagaaagattgtatcccacgtttcatcaatacttttgaaactgtgaaagaagatggcggaccaagcttaagttttgcttaaaacctctgtcaagcaaatgcgggcaaatcatcagacagcaaccacaggaggtgaaaattcagtcactagagctatagctgacgcatgattcctccacagcctcttttgttctcagacagcacagaggaatttagcaagaagaaatgtcagagtttgggacaggaccattggctcttgaattgtgaagcatttaatatgcttgattaggaaaacacaagccacaccctattcagcataatcagtagcttgaccacaagtctcgtgttgcagcagtgggatgtagcacagctgcatcctcttgccctcactcggagcaccaatcctttccctggcaccatcaaaggtctaggacatgcaaagtggctacatgatttggcttctagccccacaacctcagcatcctaccagaattgactgccttatgcgctttgatgtatctgctttccattgagcaggtctcgttttctaaaatattctcctctgcaggatacaaacttgcttcccgggagtccaagctacagggatcagtcttgggcaatttagtccttgtatctcactttgttgagtcacttcttttcttattttctctcatcagtttaattagctgggggtcattagaaggctcatctggctattaatattgagagattccataatgatatttcatcatagatcatgtattgttgagccagtgctctgtggcatcataatctctaaacatactaagattatctccatcctatttttaattttctaatattggagtctttatgtttttatttaacacaaatgcaaagttcactatgtgggaagcactcttttaagtgctttatagttattaactcatttatttctgataacaattctatgatgtaagtactattatcactctcattttacaaatgagaaaactgagacccagagagctgaagcaagttccccatggttccaccactaataagtttataaattgagctgatccattctaaccttagtcttttgcctaccattttatcaatattttattaataagttcttttcccaataaatctagaaatgtgtttccaagaaatacatttaattgtagtaattttcttatatttcaagaagtataaattttcaaggaagtccaccatagacaatcatgatgcttgtcttcaattcctcatgtttggtgaccttacatatagattcccagattcagaaaaagaattttattttcccaatacaactatagagatatatgtaactacagaaagatgtaaagaaatgtttgctccaacatgggttcacaggtaaggagggaagacaaaatactggaaaagatatctacaagaaattcctcaaaattaaattttcctcttagttttcccagagtactgaccacttggaacaataagcctacacattgttttggaggaacatgaagattttactggcatagtaatatcatgtggtttttaaaaaactcttttttagaatatgatatcttaagaatatttgctaaaatttattaacttacaaatttgatattaatatctactgttgctgtgtaggctttctcaaatatgaaattcatttagtatttctgtaaagaaatccttgcatatactaacctttaattcatttttaattaatttatcttccagctggtagactatggcagacatggttcttaggctcccagtgggtcttgggcattttaacttgaatactctgaggttggtctttttacctaatttctcagtgtattaggcctttaccttctttcacttaagaatgctcaattttcttgctaatgcactaaatctccctgaacaaccaccccctatataatttcaaagattgctttatcttctcccctctgttgcattttgataaaaggtgggtttttttctgagctgacttcaaactaaagaaaatatattttatttctctagagtcattaattctttggtagaatatattttgaaatcctaatatgtattacacatgatttagttgctttaccttctttggcaaagcctatatctgaaatgaaaaggcacacccacactaaagatgaaggactgcaagatgcttgaaatcacaggtcagaatcacctctgctaacatacttctgcccctattcgcatactcttcttcaaattaagtatgtcaggcaagaaagtgcactgaataaatgttaattgttataacaaatgttaagctgccctacagtgttaagaacatactgctctgtagattctccactagtttattttagaatgaacatctcagggatagtcacagtattttgtccacagtggtaaacccatacacagtctgataaataataagtgctaatttttatcataaaaataaatgataatttcaaatatgaatgattatgtcaaagaacaaaatatacataggcaaacctagatttatatttcattttttctcagtgagcatagttttaataataagtcatccatcagcatttactaagtgtcagagtttgggctagatattggtatacatggtatctaatttactatataaaataacagtgtatgccaggtagtataatatttatttaaaaactttgttgaaactttgtttgttgcccaagtgggggtaaagctaaattttaaatactgatctctcgagcttgattcctattctctttgcattttccccagttacctaaagaatattaaataaaaagaaactttgttccggaaatctagagattctctttagggtcttcattgaagaaggggcaagaagagaacagaaaggaatattattacgtattctactgcagcagacccagataaatgaactgcagctgcacacctgagacaacagtgccctagatttagtgatttagcacaaaacagaacaactagtcaagaaaatgatgtggttggagtatgtgatgagacagtaataagaggaattttagctgtcatgacccttttactacctaaaagctatgattccttccccaaatgctatgccagtaatctatacaaaaccaaggtagagaataatgcttaaacttctcaaatgtgacacagagtatttccaactctacagtggtcttaacgcctttctattttggattttcaaatctagaattaagatttaacaagagaccatggccaaccatgaagaatctttgtataccctcttgttttgttaatttgaaaaacaatatctatataatgtaatttaaagacattgctagtgtgctacttaggaacagatttgtaagtcccctcacacatagtggagaaagctgtttccattgacaaggggggctcaatgggttgagaatctctgctttgcctgcgtccaaccagacgactctatttcaagtttcaaggtctccctccttcctgatcaacggtgtaactttaacatgagtgagttggtgagcctgagaattcaatggataataaataagcatgaaattcattcataattaccaaaaacacatatgtgcaatacaagtgcaatactatcgctaaatctcaagtgtattatgctacaaaaaagccaaactcaaaatgcaatctaatatatgaccctatttatatcatgttttggaaatgacaaaactatagaggcagaaaatagatcagttgttgcaggggcaggaggtgggagcaagagtatgatcttacaaaggtcacaggtaaattttgtggggagtaatactactctgtatcttgactgtactggtgaaaggactatatgtgtttatcaaaactcacagaactgaacactaaaagagtggactctactgtacataaatgttaccttcatttaaaaatttttcgtaacacaatactgctgcacagccactgagatggctgaaattaaaatgaacaccagtgctaagtgttactgaacatgtggaacaagtagaagtcttagacatttttattggtaaagtaaaatgacacaactatattggaaaaacagttcagcagtttctcataaaaaaggctgggcgctgtggcttaggctggtaatcccagcactttgtggggctgaggtgggcggatcacgaggtcaatagagatcgagaccatcctggccagcatgctgaaatcctctctactgaaaatacaaaaattagctgggcaaggtgtcgcatgcctatagtcccagctacttgggaggctgaggcagaagaatcacttgaacccaggaggcagaggttgcagtgagctgagattgtgccactgcactccatcctggcgacgacagagcaagactctgtctcaaaaaaaaaaaaaaaaaaagttaaagatggttaccatatagcccagaattttcaatcctaggtatttttatccaagataaatgaaagcatatgtatatatatatataagacttgaataacaagcttcatagaagctttattatagccccaaagtggaaacaatgcaaatgcctatcaatgggtgaatggataatcaaattgaaatacagttattaaatgcaatactgatgaggaatataaactaaaaactactgataacgaccgcatggatgactctcaaaacattatactgagcaaaataagttagccaccaaagtgttgtgcactttttatttgaaattgtatctctatttatttgaaactctaggtaaggcgaatttaaattataattataaaaacatacattggtattgaatagtctgggggaactgaatacaaaatggaagaagaaaacttgttggattacggaataccctatatcttgattctggtgttggttgcatggttaaatacatttgcaaaactcatttaaccataccattaaaatacattaaaatagttttagtttattacatacaacttacacctcaatgagactgatctagaaaatataccttgtacatagtgtgagtattccgatagtaagtattgtaaatattgcttattgtttggtgttgtagctggggtcttattggaagtaaacacaccatagttccgaaaaaaatcacttaaacagcactggaatttggaattttaaagtgtggaaaaaaatctactgaaacatattccacatgaaaaatcatgatacactgtggaaatacttcaagagacagactcaacagatgacacaatgaagagtattattgttcccaagcagttgagatagataatacatataaaagaaatcactaataaaataagtaaacagataaactgcaaaacatcaagacccaagactatgaacaaaaataggcttatttagaaaaagaaatgtcagtatgtatatatagtcacttaaatacatttaaataaaaattagaagagtataaacaagcagttaggtattaagaaaatcagtggtttgaaagatataaaaagggattgttcaatatttagcatagagaaactaagcatgaatacaatcatggaggaaggaataatatttttcaacatgtgtgtaatagaaattaccccactaaaaaagaaaatacagcataagtaataaagcaaacattactagatcgtgttctataattgaagaatgaatgtagtcataatagagtcagaaagactatattaacatcagaaaagtattcaagatgagtatattactaaacagaaagaaggcattttccaaatggtaaatggtctattaagaagaaataataatctgaagtgtgtatgcacctaaaaggcttctaatgcatttttttctctgaacaaaaaaaaaggcgaatctgttcgaacattaaaaaatatcactcaatagttgctaaagcatgtagagaaaaaggtccatgtgacttgaacatcactggcaaagtaatctattaagcattttcctaaacactttacactaaaaccagaaaatattttgaactaaatggatgttaaagcacagcatgctagaaagtgtgaagtacagttaaagtggtgccttgagagaaatttattgctttaagtacctatgttagaaaagaaaaaaaatatatatttttacattttaaaaaaccagaaaaaaaagagaaaaatcctaagtaagtagaggacaggaaaaactaatagaagaaatcaataatataaaaatagcacataatcacattttttgaaattcatacatttgtccataggaaggatcagtaaaattgataaaaatttagtggttcatttactatgctgtgtagaacttgcctcaaaatttacaatggtgaaattaccattaatttagttactgattctgtgtgtaaggaattcggaccaaagatggtgggaaagttgttttcttcccaactggcagttgttggaagaactgaaaagctgggagctggagtcatctgaacgattttttactcatgtgtctagaggttgatgctgggaagaccctaaccgttggaagttggagcaactgatgcatctaaattcataaaattaagtctgaaaaagttaatgttcaggagtcttactttgaacttcagaatatgtgcctgccttagaagaccaggctattctgggtttcatgtaaaacagaagtggaagataaatctaagggaaaaattattgctacacaaatagtaaggcagctgaaccaactggtcagggaagctgttaaatgacaatcagccgttattcagctgagattcagctgagctctaaggggaataatatacaggtaacaaatctaatccttgttttctaaaatgtttatggataagttgattcttctagaggcttctaaagagaaaacttgaagaaaagtcattttgctactgtacatagtacactcactcacaaataatacattttctttggggaagctggtgaaaaattctggacatgagcttatattcctaccttgtaactttgataaagaaaactggaaattgcaaagagaatctattttagaattttatacaggagagttagagaaaaaagaaatgggggaaattcaagagaacaaaggaaaaacaaaagagagaagactacagagatggtgaaaaaataataagagaaagaataaacatttaattttaatttagagagagactgctgatttttaaaaatatcacgcatttgacagctaacaatatgactatatgtttaattttattacctagttaaaaaaagaaaaaatattgttaacatattcaagtttcttaatagtatgaagataaaataaagcaaagtttttattttcaagtttttattcttctggtaagtgagtttcacaaaactaatactgaaatttgctcagctaattctccagaataaatgtacagacactttatttgttgatgttatctttaaattatttgaaataaagtgtgaagtcaataatcagaatttttatagtctactttagctagctaattaattagcaaatgcagtatatgatattcctaaatttgaggctagttatagctaccacagaatttcgttctctttattattcagtttttaattcatgcattcatttattctataaatatttttaccaggtgccaggcactgttctaaggaaggaacataaaggaaacaaaaaattaaaaaaaaatagtaaagttgtatttactattagtaaatctagtcaataaaaatagaaatttctgacttcatgcatttcacattttagtatgatgtaactaattttcattagaactctaaggagttgctttggtttaaggtttaaaaaacaaatttaagtcaatactcctaacactaaaactgtaaactatagagtatcgactaatatttgagttagtccctccaatttagaaacaccacttgtttccagtcatgagttgatatcaccccttctgttagtttccacctaatattatgtaggttagtttgtaagacttgtttaaacacaagtgtttataacacttggagtatttaggagttttttatattttctaaaaatgtttcacttgatttgaattaatagccatgctttctttccccttatggattcagcactttgttgtttggaagcaaatgggctttgaataattgccaataagaaaagggcttgctatattccagaaattggtaatgttatgactccaaaagcacaggcaacaaaagcaaaattagacaatgaattatatcaaactagaaagcttttgtaccgtaaaggaaataatagtgtgaagaggcaacatatagattggagaaaatatttgcaaaacatacaccagaaaaggagctaatatctaaaatatacaagagtcacatactactcaataagaagaaaacaagtaatcctatttaaaaaatggacaaagtacttgaatagacatttctcagaagaacacatatgaccaatagatatatgaaaaaaatgctcaacatctctaataattagagaaatgcaaattaaaatcacaatgagatatcaccttacacttgttagattggctattatccaaaagatgaaagataagtattggttattgtatcttacataaatgttgcccagtctcagataaaattttcacctgccttgtcttctcatttgcatgtctctagtttaggtgaattttgatagcaatgttgtgagcaggattcaggctggtagtggagggactattttttttttttaagaagcagaatgaaagggaaataattgcatctcagagaagcttctcagttaaagccagcaccagtgctctacatttggtacatttaaaagatagcagggctggatcattctagctttcactaaattattttcttaaatcacaaagtaacagaagaaactcgttctcaatttttctttatgttcttgaagtttgacacttctctatttctgcctctgaaactatactttctcctatgagaatcatagcttgccttcctcaggcagtttagagtttctcaagatgttttaggatcttacagctttcatggtaatggtttttgattaagccatttgactagtatatagtttggaaataaacgggaaacatggctcagcaaatgctcctttccccgctacatttttttcttgctgcttctcccctatattgagaaaatttgatttcaagaatctaacagagatgcctggattgtttcttttcctctgttcaattcttcacttccacagagtgcaaacatttctattatttttattctcaagacttccaggctttctctgttaaaattgtgctgcatctagtatttcatctctaactcactcctggacatttctatttggatgttctttaattatatcatattgtacatgttaatatccatgcttagcattaacagggtgaaagtagcctccccttccaactttactatttctgttaatgataccgtttttcccaggtaacatggtaattattattatctatatatgtagccaccacattctgttaacttaaaaaaattcccattcatcttttatatttccactactgtgggaaaatgccttattacctcagtgaaactgctggcatagtttcctacttggattctctgaacctacctttgtttaaacttaactttcatattgtcactcatttgttcaaaaatacttactggattcctattaccagccaccctgagaatcaatttgtctgcttgacttggcatatctttagaattctagccacatgatattgttcaacttgctgcaaaattttctctccagtcagaaacctagttgcagtttacttcctcatactgcatggttgcttctaactctccgtcatctttcgtgttgcttgtatctcttctactaccatctactctcctctacctaaccaaattttgttcattgttgataagcatagaggaataattaaaagttagaattaaaatttagatagacattaaacatgagacatataagccttgtaagtgttcaatgtcttgctcaaatcaaagttaccctttgaagaaatggaagaaataaaaccagaaccaaagttcccttttgtgtaagtttcatagattacaatgtcctgcccaagcgaatgcttccaaatttctcatgtttcacttgcctgtttcaaccttctattttcttaaagactttagaagcttagagtcatctagtagacaaataatttatgttatagcacgtatccaaactgctataattatcattattatgaataattcaagtttaggtttacttgttggaagttttatatgttttgttgaaatcctctaagagaaactggaatcctctggctcttatcttgccatcagtagctgcacagtacaaatccattgtctcatcaagacctcaacccttcacacatatgtataaaataattgtttcctctttgtgaatctcttatcactttttgcatggattctcatacgatctattacgtatatgagccaggacattttaaaatgccagctatattaacccattttaaatagcttaagaataaagatcatccaaccgttaccaattggaggatattacctctcagaattggaaacaattaggtattcctatcctagtaaaacatcatgaagtggaccctgaaaaaaatgaaaagatcaagatttgtatcaattatgcaaagataaataacctctttttttgatatcaccatcaatatcaagtaagtccttttgtgtccagaattggtgggttcttggtctcactgacttcaagaatgaagccacggaccctcgcggtgagcgttacaattcttaaaggtggcgtgtcgagagtttgttccttctgatgatcggatgtgtccggagtttcttccttctggtggagttcgtggtctcgctggctcaggagtgaagctgcggaccttcgcggtgagtgtttcagctcttaaggcggcacatctggagttgttcgttcctcctggtgggttcatggtctcgctggcttcaggagtgaagctgcagaccttccccagtgagtgttaacagttcatacaggcagtgtggacccaaagagtgagcagcagcaagagtcattgcaacgagcaaaagaacaaagcttccacagtgtggaaggggaccccagcgggttgccactgctggctggggcagcctgcttttattctcttatctggccccactcacatcctgctgattggcccattttacagagagccaagtggtctgttttgacagggtgcagatttgtgcatttacgatccctgacctagacacaaaggttctccatgtccccgctagattagctggatacagagtgttgattggtgcattcacaaaccctgagctagacacggtgctgattggtgtgtttacaaaccttgagctagatacagagtgccaattggtgtatttacaaccccttagctagacataaaggttctccaagtcctcaccattcaggagcccagctggcttcacccagtggatgccgcaccagggccgcaggtggagctgcctgccagtcccgcgctgtgcggctgcactcctcagcccttgggtggtcgatgggactgggcgctgtggagcagggggcggcgcttgtcagggaggctccggcgcacaggagcccacgggggtcgggggaaggctcaggcatggcgggctgcaggtcccaagccttgccccgccgagaggcagctaaggccctgcgagaaatcgagcgcagcgctggtgggccggcaccgctgggggacccagcacaccctccgcagccgctggcctgggtgcttagcccctcaatgtcgggggccgctccgagtgcagggcccgccgagcccacacccacctggaactcgtgctggcccacaaccaccgcaggcagcactggttcccgcccgcgcctctccttccacacctccccgcaagctgagggagccggctccagccttggccagcccaggaaggcgctcccacagtgcagcggcgggctgaagggctcctcaagggccgccaaagtgggagcccaggcagaagaggcgccgagagcgagcaagggctgtgagggctgccagcaagctgtcacttctcgctttcaattaaggaaaaaaaagtgctgaacttgtgccggttcaagctagttcaaggcaagtgagcttcttttccataccccttcttattcctaccttgttttctcaaaattcatcatgaaaggatatagggaatgagatcttccatgaagagcagaacaccaggtatataaacaacttatattccatatgcatgttttaaaactattccctcctcttatagctctgttatacagacctctagttttgactcttttcttcttagacaaagatgcctagaactacaatgagcttattgctttcaataataaagaccccacattcttatttctacaggctaaaattgtgttaaatttttgaggtgccacatcatattatcaacttgtattaaacttatggttgcctaaaagtcctgaatcttttccacatacactaatgttgagtatcattttcttttgagcttgattagagcccattattcaataccatatattattatttttatcgtaaccctttcttttttcatgtcaacattctcattcagcttttgagtatattaaaatcttaaatatccatatgttctagttgtttatccaggttattggtaaacttgttggaatttgagaggatcaagggaaaacctctgaaacactgttttgagtatcaatttccttttgccttttaactttcagtaaattattttcactgggcacaaaaacacctaactgaaccattagccaccctttcattatttattacaaggatttcttttcaaatttcaaagatgctgtgtctcttttactagtatttgtcaatttactaaataatttgaaagagaaataagtaattatggcaaagcttcatttggtaaaccagctcatagtggtgttggttgatcagtgcaccacactgcacagattctactttgtgatctgatacgggcttttgctgtgattcagtgtttgtcaatatttactgaacgttgttttcttcttttggtttgtatgttatgaaatctgccttggctttttttctgtcaattctctgcgagtcttctcagtcaaagcacttgaattttaaatgtggtctaaatccgatgataggaatctacactattcatgatcaagcacattcaaagactgggcaataactcatgaattagtgtcacatcagattttctcctgtggcactctgacgacttttgcccctcagatatataataatggcttataatatgtctctaatcatgcatttgccttgccaaccggtttagttccaatatctaagttgtgtatctgtgtatatatatatgtgtgtgcgtgtgtgtgtgtgagagagagagtataattagtataattccttaccttggtaatctacttataataagtgacacattcctcttagttggatatgatgtcttaatctcctgagtcttttgggggctaaaatactgcctgagtcacaatccgatgacaagagcctcatttcctgtggattaacttttctgagcctttctaccttccagctgcctgtctccctgattccaggcttatctatcctagaagtcctcattatcatgctccctgcacttgctgattatgccccctgaccttcccatatatctcctgcctggttacactgccgtctctcacttatcatcgtcattgccagacgccaagttttggttcattggctggatgggggagacctgtcttaggaattcaggctcctttgctgatactctgtcactggctttgctgctgctagatttcttggttatttggaacatcccaagtccagttaggcctgatgagtctttgcttgccacaatctcctcaccaacacaaataacctattactgacagctaatttctttgctcccgtatctggttgccagtcttctttcctattgagtctttctagtttcgacatcccagcactttgactaataccaagccagttattatatcatctcccacatagtgctaagaattaagtagagggtccatatatataaattgctctgtaagattcctctcatctgccatatttgtgaaatctcccacctctgttatcataaaggagttattttcatctttttcatagtccacagggcaagtctgttttttacctgtttgtctcttttactggactatgtgtttttctgggacagaagccacatggttgtttagtcacataaacatttattcagcatttaatatttgccaggcaccatgtttggcagcacaggtaaagaaaaatatatacaaacatacacaattgtgtggctttagtaactctgggtcactggattttattgctagtataagtagtttagtttaagtattccacaaaagttttctgaatgaatgaatgtgtttgctaaataattgaaaatagatttttaaatctagttcctgaaaaaattatgtgctctagtgcatgctccctaagaagtaaatgacacttattgagcaaaaataaaaacgtaaaataaccgttgaagttgtattagatgctagacctcagaggtttaccataaataagataaagctgtatgccaaaggctagcgtcttttttctataaaagaccagataataaatgttttcagatttgtggtccatacagttctgccacatctactcaactctagtatggtagctcaaaaacagccacagatacctaaataaatggggataactctgttccaatacaattttatttatggattctgaaattggaatatataaaatgttaatgtgtcatgaaatatgattgtgtttcttaattttttctgaattatttagaagtcgtttatggtttataagacttacagaacgaggtaatgagtaaaatttagccagtgggcccccatctactgaccctcgatctaagcttttcttcttcttttttttttttcaagaaccctcattttaagattaaacttcagtttcttgatataaacttttaaaatttttgtaaacaaaaatagattaggtccagttttagatgttcaatattgaaaacaagaaggaggctgggctcggtggctcatgcctgtaatcccagcacttcgggaggccaaggtggtcagatcacctgaggtcaggagttcaagaccagcctggccaacatggcgaaactctgtctctactaaaaatacaaaaaaattagctgagtgtggtggcaggcatctgtaatcccagctactcgggaggctgaggcaggagagaatcacttgaacctgggaggcggaggttgcagtgagccgagatagcttcattgcactccagcctgagcaacaagagcaaaactctgtcagaaaaaagaaaaaaataaagaaaaaaaaggagtggtggcattgtcaaatactctggacaaagcaaaatgtcatggcataatgcaagaacatggataatcgtttgttggctgaaggcaagggcttatagtggcttattctctagattattttcagtcttcagatttagcaattcccttcatggaattttggtagagaggaattaataaggttcaataaaattatctttttgtgagtaggtttaaaataactcttgagtattgcttgcattaaaagcaaataaacaacaacttatccttgttaaaatcatacataacagtagagttgaggcagggatgtttgatcttggaagcctggataagcctttgccttaattttgtctaatctatgctagcattataacactgttatttttcagcctgtatttctgcctgttggtcagttgaaccaattgaaccatgtttgtgtctgaaagttaaacagaatgactccagtcccaatatcctcttcagagatgtcctcttttcattatttctactaatttcatctccagattgattgcaaacagtaggtttctaaggtttctaagaaagagtaggtttctaagaaacagtaggtttctaagactaaattcatctccaggttgattttaaacagtaggtttcctgcaaatgattttaaaggccatacaattctgagaagcagctggtgtctagatcatttatttttctccctctttgtccgtgaatctctctcctttctctattgatcatgaaggttttctcttcaagtaacttctagaattctctctctttccaataagaaggtgaggaagtgatattaaaaagaaaagactgttactgaaccaaatgaaaggctatataaacatttcatgtaaagggtcagagaaaaaatattttaggctaggtaggcatatggtgtctgttgcagctactcaactgcattatagaatgaaagaagctgtagacaattaaaaaaaaatgagctgtgtgtgtcccaatatatttataaaacaaggcatcaggaaggatttgaccagtagggaataatttgcccaccctgaactaaagtgtacgttgtattagttgtgcctattgagtaattaatattatttattcttaaagtagaaatatgatattgtgtgtcttaagacaaaacaaaaacaaagcatattaaattataattatagactatttgcaatggggaaaaagtctttcaaaaattacatacatattaacatatacagtttatatatttatattaataataatataaaggtttaatataacctttgtattaaattagaaaatgttcctttaagcacctgcatctcacacttggtttacagaacctgtttaagcagcagatatttctgtacatgtttctttgtagaagagttaggaatgaactgtggctttaaccatttgcatgagctgaacacaggatgaatctcagtatctcatttgcaatattcacggacttgtttgctttgtctggtgccatagagtttataccttgtcacacactggctgaatcatagtgtatcgtccgtctttccagactctatttctgagttgataaagtctgaggttcaatggcagatttacacatgctgtttgcccacctggtccttattcaaaaccactacttcctcacagtgaacacttgatagcaatgtctatattcattctcttctggacagatcccttgacgctatctttctaatgtctataaatgattctttggtataatggcagtggaaacgtaaagcaatttttatgtagtaattagctgctttgcaatccaaagaagttctatataacgtgaatactatgtatgtctctagcctaggctagtacagatatttgttgagtccctactatatatcaatttctatatctagatatttccatgtattttcatttaatcatcacaaacaacctgtgtgatgttaaacccaactaaaagtgaaaaatagaattatagagagtgtaataaagtttcccaaggtttcacgtgtagcaaatggtcaacactatatcatagtggtgataagcccaatttctatagtagactgagaaacactagaatcctagtgctaactgcactgttactaggtggtgtgaccttggcaagttatttacctctcaaagcctgattcttcaggtcaaaagcagagggatgttgatttgtaaaccagatgagatgttgcatgtaaaacacttaaggtttctagctctagacaatatactcaatacatgttgttggctcttatcaaaatcacagatccaaaatgagaatcctctttctcatggcttgataggctgatctttcaacgacacaaaggttagtactctttccattcacattcacacaatctgtgtatcataattgaaatgaaacctgagaaatcctttaggttagggtccaatttcaaattctggtagggtcaggcagatagcataattggcttaagttgggtgggagtagaaagtgcattgcatatgttttgtgagtgatggaaactggagtgcagactccctatcttagaaaagggagcagctacttagttccaacaaattgttggttaatagaaatgcagacctgaatttgttagttcattccattttttcaagaccaggcagatattcacattttcatgtgaaatgtgccaattttaagttgcttgcttttaaaactttaaaaacagatagacataacaaacatatatcccaactggatttggtgcttggaccattcacctgtgatctttgctagattaaccttgatgtttgaccaatgacaaaacacattaagagaggtaggtgacttgtcaatatcacattggatatcagttgaaccccagggtcagccagtgaggaatatggtggaattaggactaaaagccaggcctctttttactcccacacactattactattaataattttatatttgaacaatttcatttagataattccatcccagatcactccaaaggctctttaactggaagatgtttctttctaatattagtgtaaaggagtattctagaaataactgctagtttttccaggtttgattgttttaccctagaatttccacttaaaatattacaagaatttatgactttaatgtcaatatctttctttataaatttagaaattccatgtttctacaaaataaatcatgactttttttctattcaaaagatagtttcaagtgaaataatgaggattatactttcaatattgccataacattgcaattctctaaaatgagagcattaggataaatacctaatgcatgcagagcttaaaatctagatgacgggttgataggtggagcaaaacgtcatggcgcatgtatacctacgtaacaaacctgcacgttctgcacatgtatcccagaacttaaagtcaaatttaaaaaaaaatgcctgcgttgaattgaacatttgtttaaaagaaggggaaatgcaatatacaggtatgtatgaggctcacatgacaaccccagtcaggcacgttgctaagcactttataagcgctgtcatatattattctcttaaaagatctatggaggtctcttttattattttaacagttcttttaataattatctagattcataattatgtataaggaattaagtctatgcagtcatgccacctggcaaatattccacagttaataagtaatgcagacaaaagtaaaactcaagtgtattggttattaagccttgaagtaataaacttgttcagaaaaatttttggaactctggaggaagccacatcatgatataaacttaagataatgaaacatctctaacaggcctgcccaaaagattatgtcatataaacataatacctttgttaatacgtctgttaagaacatttatgccttagggctttggtactgactgttctctctgtttaaaagactcttctcccagcacttcaagtggctgacagtctcgcatcagtaacactttctcaaagtaactctcaaccggttaactagaagcagagaccaaaactatgttttattatatcatccagctttattcatttacagtccttattatctgaatatattttttatgtatttaggtagctatatctctacatagctatcttcactcaaacccaaggtccatgaagacaatggattttctatattgctcaccactgtatcctcaagcctagaaccctacatggcacataataatccctcaataaatatttgctaaatagatgaatgaattaactttgtgttactcttagccatttgttttggtcataaatatgatactgtgtttgaaaacacaggctatcaaagtacagagggtattgcattatgttcaatgcagaatcaggaactctcctgttaatagggaaatgttacttgaatcccgattataaagcataacaaagcaagcaaataaattcacacacacacacatacacacacacaacaattttaaaagtcattttggggacagtccaggatatttaatatgtactctatggtacatggtgatatgttaaattcattttcttactgtgataatggtattctggttctacaggagaatgactttggctttagaatgtgatgctgaattatccaaggatgaagtgtcaaactatctaaaatttacttttaaatgactcagcaaaagcaaaactatgtaaactgtatataaatcatatatttatatctaaatctgtgtgtgtgtgtggagggagagagagaatacgaatgtaataaaacattaattattagtgaatataggtgaaatgcccatgttacaagtcttcattttacaattattttagcttttcagtaggtttgaacatccataaactaaaatttgcaaggaaattaagaaaatatttctgatatgacataactgtttaatatttccttgaaatttattcttcaatttctgtatttacatatctgtttagtgacatcaaaatgcttaagatgacaagatggaaaagaacaaagtttgtaaaaagctgcgtgtgactctcaattaataatctactttagtctctttctttaaattttatagatatacttgaattgtaaaaatttctcccgtttagtctaagggagaagaggtttgatcgactttatgaaaactatttatatctgagttatcataacacataaacgaagagtgtcatcaccaagggcagttatttacaggaaaatagattttactaaaatagattttctatctccaaatttatatactgtacatactctaaaataattcaatgaacttggaaactggtagacatattaaatataataactaaagaacaataaaatgaaaatttttctcacctttctgtttttatgagcatctttcaacaatagacacaatgcaatatttgcctctgggtctcaatgttcaagtacatggaaataattttgaagattgctagctttgtatgcaggtagctaattattgattagaaccttttctcattacagggaaaactgattatctactctcatggctcaagacaataaaataaagggacagttaataatgtgtagtcgtgcatttcacgaaaaaagttacagttggaactgtgaaaaagtggatacgcttattttacaccacctagtcatttttaaccaagaaacaattggcacaaaaatgtgttttcaatacaaatgtttggatggacccactaatctttcttgtaaatatgtgatactttttcactagttgtttcacagtagcaaacactggaaataggaggctttactacaaatgctattttactttgtcagtttcagttgacttatcctatgaaagatccaagactaaaaatcataggatcctatctcagtaatcaggtcgacaagatacaggattttgtgcagcattttatgatgaagatttagagagatttttaatgaattctggagtaaaatcattatgatgctgtttacaaattaaagttaatagtaacaagggaatagattgttgaggaagctatcttactaacagtgttcttcttgagggcacttggtaattaaccagaaataaaatttttatcgtcacttttactttcctttggaccattttgtctctataaatatgttattcctatgtgtccttgagaataaacatttatctctgaactcctgccttcatatacaaacttctctttctttgtctcaactattagtattcattgctgaagtgttattcagtcatacatttaggagccatttatatttattcagtaagttatatttcagtttatagtggctaatatgtatttcagtaaagattaattccatgctttgggtattacttgtggataaaaatatcaactaattacaaaaattagcaggggtggtggcacatactgtagtctcagctactcaggaggctgaggcaggaggatcattttaacccagaggttgcagtgagctgagactgtaccactgcactccagcctggatgacagaggtggaccctgtcttgaaaaaaaatcaactaatattcataagacaaattattacataactttatcccagttgagcctcaagatgatcttgggaaatatgtagaggcataccttagagatattatgagttctgttctggacaaccacagtatagtaaatatcacaataaagtgaatcacatgaactttttggtttcctacttcatctaaatgttatgttgacactatactgtagtgtgctaaatgtacaatcacattacatcttaaagcaatgtatgtaccttaatttaaaaatactttattgctgataaatgttaacaatcacctgaaccttcagcaagttgtcatcttttgtagtggaggatcttgcctcattgttgataggtgtgtgctgataagggtggtggttgctgaagactgtagtagctgtggcaattttttttctttttttgatggagtctcactctgtcgccaagctggagggcagtggcacaatctgggctcactgcaacctccgcctcccggttcaagcaattctcctgcctcagcctcccgagtagctgggaccacaggcacgtgacaccatgcctggctcattttttgtatttttagtagagacggggtttgaccatgttggccaggatggtctcgaactccagacctcgggatccgcccgcctcggccttccaaagtgctgggatttacaggtgtgagccactgcaccaggccggcaatttcgtaaaataagataacagtgaagtttgatgcacagaatgattctttctttcacagaagatttctctgtagcatctgatgttgtttgattgcattttacccacagtatttcttcttgcaaaattaattaatcctcacaagccctgcctcggctttatcaagtaaagttatgaaatatttggaatcatttgtttttatttcaacactgttcacagcatcttcactaggagtagtggtactactcttgcaatttccgccacatctgcagttacttccttcactgaagtcttgaaatgtttcaaacctttcaaaattgattccagtcctcatggatggaaacctttcatccatgatgattgcaatcaacttcttccaaacgtctgttaatgttgatattttgacatccttccatgaagcaagaatgttcttaatggcatctagaatggcaattttctttcagaaggttttcagtttactttgcctgaatccatcacaggattaactgtctatggctgctatagctttataatatatacttattaaataataagacttgaaagtcacaatttgtttttgatccatgggatgcagaatggatgtgttaacaggcatgaaaaccacattaatctcgttacacatctcctttgcaggacaatctgcatcagaaaattgggcaactctgcagaattgtagggattgagacttggaagccttgatgttgcttaattggagaatagaggtggagttacacttcactagggtccacgtatgagtatgtggaaataaaatcaaagaaaatcactggcctctgcttttgaaaaactgaagaagaagaaaaaataaagtcaggttactgaaagtaacaggtgaaagctagaaaaatgtggaaaatagagctaaaggtctccaaaaaaaataaagaaatgcaaaaaaaaaatgcaggacattgacagagtggtccatctaagtagtcaatgctagatgtcactttgctgagttactctgacagccgcttgagttcacagagtaaacagacaaaagggtggtaggaaaccaggaaaacaagggctctggtgtcattagcaaaggaggctacggtgctcttaaaatttccagcaccagacagtgtcaaatataaaattattaatgcttaggatggagggagaatttaaagggtccataatagtgccaatatttccataattctgtataaattttacagcaaggaacagctttgagtacaccatgtctggatgtttaggaaccccacttgctcatggtcattcccatgtcttctcctaaagatgaattatggatcctagttagcacccagagacttagctgagacccttctgtgctcttcacttacaatttccagtctccttttattatatttccactaatgaaacattttttaaattttcaaatcaattattaaccgatactatgacaaaatgaaataaaaagaaatgagaaggaaaatgattacacccttagaagtgatgatagtgtcagattgctatacaggtttctatatgctctcttaatttatgtaattatctagtcccagctctgtaacatttgtgggtcagtgacaattcagggatcacatttgaacaattactagatgacctggtgcctctctttattgtaatacaatgtatggataggacataatttttacatattttagtaaagttctagaggtaaaatttgaggtcataactttttagtgcaaatctcattgttttcaaaactatttgcaagatattgttaaagtggcttggggtgcctttgaattaaagtttcctttttctaggtgaaaaaaaaaaatagcaaatgttggcggtggcattggcctgcatcttactactactttctcagtgctcctgggcttagaaggagacgtttggaggataaaacattgttcttcagttgtaaaacatttggaagataaaactctacagtctctgtctagcttctgcatatctttgatcaatcaattcaaaatattatgaacttatttttccctgagctgttatcaagacgagtttgcaacagtggggacaaattgagaaatctccttgagaaagatgctataaattaaaatgttctgagtttttcatcctgcctttgcataattatccattgtctgggtttcagaaatttttgaaaataaataaatcttggcatgtcccatagattgtatactatgcaagatttctaatcaacctactttcatctgtgttacgtgttgccattatgtaaataatgaagtttcttggattgcttgcctttccccttgtccaaacacacacagtcttggcagaaatataataagttgctaataaggattttaggcctattttttgtataaatatttgagatgctacaataaaataatattgatagtgaatgcatatatagcacttactatagaccaggatctgttctaaatgttttatatgcagtaacaaatttagcctacttaacaacctaatggaattttcactgttagtctccccattgttcatgcactgctatcatcttcattttaccatgttgttagggtgaaccaatgttgtttttgaaaataggtcagggccttctcctgaaggtcctattccccttgttaaatcattgcaaatggaatataccaaattcagtaaagaaacttgagcagctctggtaaattaagtcaattaaattattttatcacattcgtagagtattgggcattcccattattccagttcaccaggcagaactttcagaggccaagacttcctttttcttattacatagctcacttcccattaaccctattcaaaatcaatgatttcttgacattaaaaaatatctgctcttttatccagatatttgcaaatttcttggtgtttaaaaaattaaacatctgggtggttgtcttctttcattttaaacccagtgatgtttttctgaaaactcatgattgtattatcaaaattgcaattctcacctctgccacttcttagcatggtgtatgctaccagcttgctaggttagcagtaggttagtataatgaagctggagccaggataatgacacagtgaagaagtatgtttcagtggtgaattacatgagctacaatttcttcattgcagcattcccccaaaggcttctttattctattgccattgaccatcacggtaacagctcataccatgaagtcttttatagtggcattaccagaaatgaaagatggaaatgtgaagtttgcccacattttctttttttattttgtaatgagtgtaaatttaataattttatatattttcttgttttggaaacctgaggtggtctaatactcaacatttgtcagtgcccactggaaaccattctgagactccctgcagctgaggatcacaggtactacttgggtccatagtcccttacccgatgtcaaagattaacagttatgcaataaatagaagacagttgaataaactattatctatctatcatctttctacctactatctatcatctgttatctattatctttctactatctattttatctatctatcatcatctatctatatttatcattgaaagccttctaagaaaagcgcactgtaccttataattaaatgtctctgttcttggctaagaaaacagaaattataaggtacctaaaataaaggggatagaagtatactgtagaccagaacctgttagaaacatccagtgactttatattcctgcttgtaaagctggatagctggtaaacctccttgtagtattgactgtagatacccctactgtatcacttgaaccttatgcatacataaactccctgatgtagacctcatctttcttctacacaaatcaacttggattcttccttcagctcttagattaggacttcttgccacttggaacccactacccttcctggcaatttaactggtaccctaccacatcaaccttattttctcttcctaaggggaaaatgaagcatataggagtcaattacactttcagggtttaaaaaaatcactgacagattctgtgtctttctttagctcctttatattcctcaggcttcaatgactgtgtagttcatggttgaatccaagacttcatttcaaactgctttttagaatgtttcggacaaaaagtctaaaaatagtaaaataaagaccagaaatgggtctatgtgctcctatctatctctttgttcttttcagcttttcattgtaatgatgtgaattattgctgaactgatgacctcaaactcctgcaaacaacttggatatcagtgaccccatgagaatctgtaatatcactggacatgaaaagaagcctggtcccttctacaaccatgacatatatttgtatttatggtcctctggagaatcttgccttttcccaccaatttttattttactctatctatagtattgtaatttcagaagaagaaaataaactacattccattcattgcctgacatgaaaccatatttttattacatctgtcaagtgactctagatatctaatcacaaagtgagatctgagtgtgcctttcatgaatactaaaaaaaattcactgcatctcatatatatataccccagattctatttgttacttcttccatacaatctggattttcttaaataatttatatgtaaatggtttagtaaatacaattgctatgaattttctggtgaaaaagaggcattcaatccaaaaattatacgtactttgaagtaaaatttcctagctgtgaatacctgtggtgacaccatctacattaacccaggtatgtttcaattatctcatctgcaatattggtatagtagtagcaccaaacttaaaaggttacaatgacaattaaataattagtatgtataaagtgaacacgcagtgcctgtcatatagcatttgctatagatatgatatctattattaccatttggtaggcattcatttatactacatttggatccaagatgaagatgtcaaactagattagctgcttgcataaaatagtggaaactcaagaatgaacaagtatcaagataaatcacttcatttaaacaaagtgagattggtaatcttttcattcattcattttattcattcctttttttactctggaaaatatagggtagttagatgagagatcatattgatattatagtgtagtgatagaaaacagagcaaatggataaataaatgcatttgattgtgatatatggatgaaactaggttgatatgatagagaataactaaactggaagaaggttaagcgtgttccataggaatttgcatttgagctgaaacctaaaggtaaatgggtgagccatgctaagagctggaggcagagaactccatatagatggacctttggccttttgtagaaataggaagtattatttggctaaaggacggtaatccagaaagagagtggtgggaatagaatcggggagggggacagacggtagaacgggtaaggcatcatgtgccagaataaggccctcagttgtttttttttttttttttttttgctgagtacagaagaaaccaataggaagattttatacaagaaagtgatatagctggattgacatacattaaaatctttctgtctcatgaggaaaatggtttgatgtgggtgaggttcttgacaagaatgaaagcaacaaactgtttaggaaacaactatcaaagtcaagggcagaatgttctagtatggtaggggtatagctaaagaaagtgggcaggtttctgtcatatttcaggagacaaattgattggaacagcttgtgaatttgatatgggtgaagcaggaaagatggtttcagtaactacataaatggcttactgtatattttaaactgcaagatctatgtgggaaagtagctggctaatattaggtcatttatctaattctcagtcttatcagttgatgatataaacccctctcacctctggctttagccttgtttcaatctccgctcacctccaagctggatggggctggaaataaccttggacagactccacccattgctccttgtgtaaattctggcttctacctgttcaccaaaaatcattttcccttaacttctaacagtagattacagtactggatttcattttcactcatagaatagcagtagtagtagtatgtagactgtagtactagatttcatttttgctcatagcatagcagtcaaattttttctccatcaccacccaggttcatcttcagcccaggaatgagtctttaaagcagtctgtctcaaacaatgtttcccatttggcggtgctgtatatcttgagctattttgttttagacccctctacacctgatttttcagtctactcaaagtactcttaccacttgatttgtcagtttaccagaagtttgtaccttggttttatcccatgatactcttctcccatttcttctcttagctttgcctatcaattttgactcaaaacttatcccttattttataattactattaacagctttatgtaaatagtcctcctgagcctgagaaagctgtctcttccaaagaacttaaatgccacactctcactgtttgtcttgtaggtgcaatagagacataagaatccctgacttgattcttaacctattagatttgtgcaaaactaattgtggttttgccattacttttaatgacaaaaaccacaattatttgtgcaccaaactaatacttaaataaaatttggaaactaaaagctgcctaggtcttgtcaatacttgtgcaacacttgtaacaagcctcatctcaatagtaacttgtttgccaggctactaaccagagccgaagaggaggagccaagtgaacaaagatattgccattgtttttacttcagggtccatctctctggaagctacaacttcatccagccaacaatattaaataccagtactggttccagtagaacttaagttttccctctggatattttaatttgtgttattggtctgtggccataccaccctggaagtgcctgatctcgtcttaatttgtgttattgaatttttttcttcagcaccaaggcctatatagctgattttctctagcctcagttctggatctttcccatttccttactagtcagtcccactaaaagtgttgcatatcttttggtttaccttgatgtgaccttctaaatgttcatcttacagatgtacgaatgttaaaatagctttgttgaaaataccacggagtgctgcatacaccaaaatctatcattacatagagtaaagtaaaagtcccagtaaaatattcttagagataaaggtaggctctcactaaccacagcaccggcccacaccttacttctacaaggtgcatatgtaaaaaataactttaatattgcaatactgcagtttctgtatttcaccaagttgaaatcacaaagcctagaaaaagagagaaaatgagcatgatgattaatactgagtgacaacttgattggattgaaagatgcaaagtattgatcctgggtgtgtctgtgagtgtggtgccaaaggagattaacatttgaaccagtgggctgggaaaggcagacccacccttaatctgggtggccacaataaaatcagctgccagctcggctagaatagaagcaggaggaaaatgtgaaaagagagactggcctagcctcccagcctacatctttctcccatgctggatgcttcctgtcctggaacatcagactccaagttcgactccaagttcttcagttttggaactcagactctctctccttttccttcagcctgcagatggcctcttgtgggaccttgtgatcgtgtgagttaatacttgataaactcccatatatatcatatatatcagtatttccaactctctacacattctatgcatataaaaatcaacctgattatttcagaatatctaaatgccagatttctagattttaacattgatggtcccattaactgttcatttctcttgtgtcaagttaaggttgggaagcaaatgatgataagttcataaaaatttatatgatatatatccactccatttatatatataaatatatataatatatatgtatatataatccattagttctgccccccagagaaccctaatacaatgagtgtattaaaacaaattatgaaaattatgaaaaacaaatgcagcacatatcaaagattaacagtgtaataaatatagaaatccacattcaaaacccaaactaatgcagctgagacactgaattagggtctttttaccttatgttttcatcccacactttaaaacatacattggatctgttaatgggctgcacctcttttctattaacataaaaataaaaacatcataggcagtaggttaaatctataagggaaaggcatacgcttgcttggaaaactaaaacaacttgggaagagtctctctccccacaagtagccagggctagtgccatttttgtaaagaacatgcagactcctgagttactcactgctctgtggcactgaggtagattactatctttgtagtaatgtagattaatatttttcatcatatgacttgccccattgctgtgtgggaaattctctaatcaatcattcctctccatcactaccaccatttttaaaaagagatttaggcttggggaggtggctcatgcctgtaatcccagcactttgggaggctgaagtgggtagatcacctgaggtcaggaggtttgagaccagcctggccaacatggtgaaaccctgtccctaccaaaagtacaaaaattagttgggtatggtggtgcatgcctgtaatcccagccactcgggaggctgaggcacgagattcacttgaacctgggaggtggatgttgcagtgagcttagatagtgctgttgcactccaggctgggtgtcagagtgagactccatctgaaaaaaaataataataaaataaaataagatttattatcagggtagatgtggtgcttagttttggcatttttattttgaattatttgtacacgtaagactcagtctttaaaaaaattgcttgataaattttctcaactttaaaagaatttcaccttctttcaggaaaattgccacacttaccttaggacatgtcagacagacactatgcttcctggctggggtagaaagaactatgtcttcctcacctagagttagattcttaataaataggtgtaactttacagttttggggaagaaaaaagaaaattgtaatgttggtccttagaccaaatttattatcaaattcccatgaataaagggatacacagaatcccagagcagcctcaaggctaattctggtaaaatacctggggatgtctgggcattgacttacctagcctagcagtgatttctcacaggacaagttacaagagttatcaagaacagttagagaaaccaaaagtctatagcaactcaatgaaaatggccaaataaatgctcctcaggcttggcagaatgccattcttgttccttacactgatgagggtctgcagagatcagggagctaagatgactactaacagtttgagtattttcttttatttgatcatttcagtataaaacaaaggcagaggcaaaaaattccagcagtaacaacagaactatcactcatgtctttcaatataattgtgacatttgtctgacaatcattgccattttgagagcccagatgcacttataaccttcctgttaagatgtttacacaaattgtatgattaatttctacttaacagtatttgtaactctctgcaaatcaacctgattatttcagaatgtctaaatgccagatttctagattgttaacattgatattcccattaactgttcctttctcttgtgtcaagttaaggttgggaagcaaatgctgataagttcataaaaattagggtatttttttctccaggtcttggctataacattattgatgaaatgcttgcacattttataacctacctgtcaaagtcaaatttaattcatatgaagtattttttattctatgactttccatagcctgcaaagaatatggcagtgatctgtcttagaatctgcatgacctaaacaaagggatctgtttaaattgctttttttgggttccacccagccctagcattctatcatcaactacgcacaatcatgagaatttcccataaaaattccacaaagcagtgaaaaaatggttttacatacattataccatttttatcaaggctattttctctttttttcagtacgcatgcctgtatgtcattcaaactttcttttgcagtaggtaaagatgaaaatattccctgaaaagctgccacagtatgcaagaaacagtctgcatctcacctttggacctagttgatagaggtttcttcaaaaggcatatgacaggtgccagagtaggggagactgacaggacatttactaggaggtagtggaggtagatttaataatgtattataaccttaaagatctttcaataactgcaattttttcttaaataagagacgcatctaagaacatctttaatgtccggtacatttgtacaaagcttttatttataatgaaatacaacatcaacataacaggttctgataatttgagttcctatccaaatgttttacaatagtctagagccttagattagccatcagtgcagcagtgtataacctttttgcttctaaataagcatatttaagaatgagacagaagtaattcatattattaaggctacattacatgaaaagaataagacattcacagtttgagccttaagcttattatataaaacgcaaactgattgcagatcaagtaaattatactcaatttttctcaatactctgctagaatctactttgtaaaattccaagagaaagagtattttattattaccccttcacccccaacatatatttaagctatatttgattgtatataatacatacactttactaaatttatggtatacaaatgatttatatatgcatattatgaaatgcaaatatttgtatataagaatgctagctagcatataaaacagtgaaatgccaattaaaatatccacagcacagcaaaaaaaatggaaatatattcattatataccacattatacttctaaaactaagactattactcctgagagaaattttaccttatataacactcccaaagtatattaataaataaaacttctcttgcatctatcaaattttacagaaaagattccaggtttggtgaaccgttttctctattaacccagcaatcaagtcatagtaacttacttattctaataaataaataccaccacacattagtaatagaaaactactttgtgcatcatttttttagttgcgagtggttatattttgccttaaatcagattccttaaaagcagacacagacatgaggactcatatgcaagtgcttactgtagaaacacttccatgacaaaccacaaagtaaaaagataaagcactgcaagaagagcaaaaaagccaaatcagcgtcaggtttcgaactcccagtctcagtctcttcccagggagcagtttggagtgtaaattgtcccacagactagtcctactggaagcaatttagctaagctttcatacttttgtgcctgtgaactaagataaagtaaatttccaagccctttttggaaaaaaaaaaaaaagttccagtaatcaaaggacagtatcataaagaagggttgtattataggcctttagaagcaaatttacattgaagctgaaggcaaggctcaaagaaatagcaagaaagatccaagagcaactgagcagaggaccaacattacccactacacatttgctgagggtgaccctattttttatcaaagacaaactcttcccaccctagtcatacatatttacatcttatataattatcccccaaatttctaggaacacatataaattaaacattccaataaagtaattctcatctattaaattgaataattgaactcgattttctctaagatccccttaaaagcgttgtctggaccagccatactctcagtgtgtggcctatgaaccagttccagttgttgaactgcgagcaccattctatgaagagaacgacaattgagagtaagcatttaaaataattataactatttgttggataattttatatttcagttgaatcaagtaaaaatgtggcttgtattttctatatatttgttttttctttcatttgtttcatagtaattcattttttattgtattttacagaaacattgttctgcaacagatcagaaaattaaaaagcttgtcctcaagctttctttgtagtgcaatttgagtagcattcttttatactatccaacttcaatttgtctcctcttactctctattaagcctttttctagtgtgctttttgtattagcttcctagggctgctataacaaagtattaaaatgctgagtagcttaaaacaacagaaatgcattctttcacagttcttgagcctggaggtctgaaattaaagcattactggggccatgcttcgtttgaaggctacaggagagaatccttccttcctttttccaggtttttggtgaccccagcttttactggacttttagcatcataactccaatctctgccttcatcattacatggtgatatggtttggctctgtgtcaccacccaattctcaccttgaatagtaataatattcacatgtcatgggagagacccagtgggaagtaatggaatcatgagggtgggtttttcctgtgttgatctcatgatagtgaataagtctcatgaaatctgatgatttcataaagggcagttttcctgcacatgctctctctcttgcctgccactatgtaagacatgactttgcttcttcttcgccttctaccatgattgtgaggccttgccagccttgtggaactgtgagtcaattaaacctctgtactttaggccgggtgcagtggttcacgcctgtaatctcagcactttgggaggctgaggtgggtggatcacaaggtcaggagtttgagaccagcctgaccaacatggtgaaaccctgtctctattaaaaatacaaacattagccagatacagtggcatacacctgtaatcccagctactcaggaggctgaggcaggagaatcacttgaaccagggaggcagaggtcacagtgagctgagatcacgccactgcactccagcctgggcaacagagaaagactctgtctcaaaacaaacaaactaaaaaacttccacactttataaattacccactcttgggtatgtctttattagcagcatgagaatggactaatacaggaaattggtactggtagtggggcactgctatctagatacccaaaaatgtggaaacaactttggaactgggtaggtaacaggcagagtctgaaacagtttggagggctcagaagaagacaagaaagtgtggaaaagtttggaacttcctagagactcgaatggctttgactaaatgctgctcatctcagatggagatgaggaacttgttgggaactggaataaaaatgactcctgctacattttagcaaagagactgaacacattgttcccctgctctagagatctgtggaactttgaacttgagagagatgatttagaaatctctggtggaagaaatttctaagcagcaaagcattcaagaggtaacttgggtactgttaaaagccttcagttttattcattcatgaagatatggtttggaattggaacttatgtttaaaagagaagcagagcataaaagttcagaaaatttgcagcttgacaatgcagtagaaaataacccgttttcaagccagctgctaaagtttgcataagtaatgaggagctaaaagttaatcatcagaacaacggggaaaatgtctccagggcatgtcagaggtctttgtggtagcccctcccatcacagggccagaagtctaggaggaaaacatggtttcctggactgggcccaaggccttactgctttgtgcagtctcaggtcttggtgccctgagccccagctgtgactaaaaggggccatggtacaacttgggccatggcttcagggggtgcaagtcccaagccttgacagcttccacatggtgttgagcctgtgggtgcacagaagtaaaaaactgaggtttggaaacctccacctagatgtcagagaatgtatggaaactcctggatgtccaggcagaagttttctgtaagcacaaggcctgtgtagagaacatctggagggcagtgcagaagggaaatgcagggttggagcccccacacagagtccccactggggcattgcctagtggagctgagaagagggccaccatcctccagacttcagaatggtagatccactgacaacttgcatcatgcacctagaaaagctgcaaaaactgaaccctggtccatgaaagcagctgggaagagggctgtacccagcaaagccacaggggaagagctgcctgaagccactgaagcccatctcttgcagcttgacctgaatgtgagacacagagtcaaaggagatcattttggagctttaagatttgactgccctgctggattttggacttgcatggggcctgtagcctctttgttttgggcaatttctcccatttggaatgagtgtatttacccaatgcctctaccccttattgtatctagggagtaaccaacttgcttcagattttataggtccatagatggaaggcacttgtgttgtctcaaacgagactttggaatgtggacttttgagttaatgctgaaatgagttaaggctttggggactgttgggaagtcatgattggttttaaaatgtgagaacatgagatttgggaggggccaggggcagaatgatacggtttggctctgtgtctccacccacatttcaccttgaattgtaataatacctatgtgttgtgggagggacctggtgagaggtaattgaataatgggagcaggtttttcctatgctgttctcatgatagtgaataagtctaatgagatcttacggttttataaagggcagttcccctgcacaggctcgctctcttgcctgccaccatgtaagacgtgactttcctcctcctcctccttccaccatgattgtgagacctccctggccatgtggaactgtgagtcaattaaacctccttcatttataaattacccagtctcagatatgtctttattagcagtgtgagaacagactaataaacatggctttattttttgtgtatgtctgtgttctcttctcttcctataatgacactgtcttagaacttaaagctcactctaatccagtataattttatcttgattcttgactgatcatattttcaaagacccatttctaaatgaattagacatgaatatggaggtggatactctccaaccctctagacttccccagctctcctagttgtacttgtttgcatttgcatagtaactttcacattgctaaatttaatggtcaattttaagtcctcacctaatttaattcatatagatcatggtttcccaagacagttctgttttaaaactgttgtctaagatggggattgttttaactttaaaaagtgtttggataacaagttatatagtctgctaactttaattaggacctgacatagcttataactcccttctccatatattatccgacttcactgatttatccttttcattctcttttattgatttcccttttctccttagcctcttgaagttgggttgcctcagtgttcagttcttggatatttctcttcctatgtatacactactttttggtgacttcatgaacccaatatttcaaatatttctctaggcccacaactcccaaatttgtgcattctgatgattgtcccttgaactccagatttgcaaacacaactgattactcaaagtctctacttgatgactaacaaaaaaataaaattatgttaaaaatgcaaagtatgagttctgctcaacctgtggcttcttttatttcagtagtgcagtgatgagcactttatgtataaaatagggtggtcaggatagaatttattggtactacatttgagcaaagatttgaagaatgtgagggacttcattatacttacagcaaaaaaagtgtttcaaacaataccacaactatggcaaaggcctgaaggagaagcgtatttgttgtgtgcttggagcagcaatattgctggaaaaaaaaaggggaaaagaagaaaagggggaaaaattatgtacaatcttttaaattgtggtaaggattttggcttttgctcatggccattgtaacattttttaactttttctgggaaaggggtaattgtttttattaatgtataacacaaacagaaaattgcacaagttataatcatagaaattaatcaatattcctatactaaatattcctgtgtaactcatacccatatagaaacagaatattatcaacatcccataagctccactcaggtttgattccagtcattacctgtataccatgcccccaggagtaaaaactatcctgctttctaacgtcatagatgaattgatgaataaagataaatgtaataaatggtagattaaatgttgataaattagatcatacaatgggtacttgtattggttcattttcacgccactaataaagacatacacgaaactaggtgatttataaagaaaaacaagtttaatgaactcacagttccacatgactggggaagcctcacaattatggtggaagacaaagaggagcaaaggcatgtcctacatggcagcaggcaagacagaatgagagccaagcgaagagggaaaccccttatctcttgagaaggacctgttgagtactcactctcctattacgagaacagtatggtggaaacagccccttgattcaattatttccacctggcctgcccttaacacatggaaattattacaattcaaggtgagatttgggtggggacacaaagacagtatcagtactcttttggttctgactgactcatttcatccagacttcatgggaatcaaggattctcaggaagataatagagctaggaactgaacaaggaaaattctggtggtgatggaaatattctatgccccaattgtgatggtggaaatgctataatatacatctgtcaaaactcttagagctgtacacataagaagaatgaattttaccacatataagttatacctcaacaggcttgttttttaaaacaaccaaatgctgcatgttctaacttcttagtgggagctaaatggtaagaacttgtcaacacaaagaaggaaacaataggcactggggtctacttgagttgggagggtgggaagagggagaggagcagaaaagataactattgggtactggacttgatacccgggtgatgaaataatatgcacaacaaacccctgtgacatgtgtttacctatgtaacaaactttttcatgtactccccagcctaaaataaaagttaaaaaaatgttgaggctggacacgttggctcacgcctgtaatcccagtactttgggaggccgaggcgggcggatcacgaggtcgggagattgaggccatcctggctaacatggtgaaaccccgcctctactaaaaaaaaataaaaataaaaaatacaaaacattagccaggcgtgatggcaggtgcctgtggtcccagctactcaggaggctgaggcaggagaatggcttgaacctgggaggcagagctgcttgttagctgagatcgtgccacagcactccagcctgggtgacagagcgagactgtgtctcaaaaaaaaaaaaatgttgagacaaaaaacgtttaaaaatagaaaatgaaaagtaaattgcacattagacttgacagtttttaattaaaaaaaaaatcttaaaaaaatccagcagctgctaaatatgggaagaaaaataaatttatggggaaagcatttgcttgttttgggacctttgggtttgggggtgctggagaaatatctctgtggacacatttatccagtactagaaactttaagtctggaagtttagaagagaggtagggaagagaaaacacagaggcaatacttgaaggatttcaagtgtataatagaatggaaaatgtgataaaatgtggtgtgaagaattctatttgatatacaattgttgtactatgtgttttaactttgttaaatcaaagtcgactgtgctacaaaaaaaaaaaaaaatccagcagcaggagttctttgatttttgttcttctgttttactattaatgtgcctcaaggatttcctttttgtcgactattttctgtgtcttgaagataactttcaggttaacttttgacacttcagactcctgactggttccgtaaataactgttttttcctatttttttagatgattttgcttcacagtagtgtgtagatatgttttctgccccaatcagctgcaattaaattgggttaaaaatacataacataaatgtccagcactgcttcttaatgaagggctatgaagaagatcattttacttggaaaccactatggttgtggcaggaactagaattaacatgttctgtacattaatggattttcaagttgcactatttcctttaataaaatagattaagctgctgatttaggtaatttgttgtcatattgtaaaaccataaggctttttctattagcattcttcttcgcaatttgcaattcccttccattgatttttaagtacagaagtttgattgacaaagctcttgggtttcttgtaaaatgatagaatgatagttaagatcctgaaagtttgagcctatgtgactgaagtattacagaataacaaaacccagttcagttacagacatgatctattaatagataaatttaaatttaattcaaattcattaaagaagtgccatacctacaattacccaaaaatcagaggtagctatcacttgtgactctgatgaattttgattaatgtagaatgtagacaaaatatattttgagactttacttttcactttgatttgggaagaagattcacttttgtttgtaagccacaatagcaatgggttaataagcaaaaaaacaaaaattaccaactgctattttgtctgcaaggcaaaacaaataagtttaaattacgtttttcatctactcaacaaacatgatttaaatttatgcttggcacaagatgctgtgctggtaatagcaggcacagtttctgctctcccataggatacattagtgggagtgactgataagtaagtcactatacaaattgaaatccgatatgctgtaggagtatagaagatggagcaatcaattctgacttagtggataaaggaagacttttgaattcggtcttgaaagataaggggatctgaaatggatgaaatagaggaacagcatttctgatgatggtaaaagtttaggcaaagaaattattaagcgttttcagggaaaggtaaatcatctatcgtggctcatatgaattaagaagagatgtagaaagaaatttgtatctatgaagaatttaggctgtacaatgaaaggcattaagcctccatattgtgagttacccttcagcttgtgatcacctattcaatgtctgccttctccattagattctatctcaatgagggaagtgtcagtttttaacttttaaaacaccttatcaccagagtctagcgcagaaccttgcacatattagacaattatattttataaatataatgtaaatattaagtgaatgagataatgtcatgctaaaatcttgtacttactgtacactgcacataaaatatacaaaaatacagaaagaaagactttcttaatattttttgtagtttttatgtatttagggggtatgagtgcatatttcttacatgcacacattgcacaggtatgaagtttgggcttcatcacctgaacagtgaacattgtacccaataggtaattttccaaccctcactaccctcccaccttttgtagtcactaatgtctactatttcactctgtatgtccatgtgtacccactgtttagctccctcttataatgagaaacgtgctatattttactttctatttctaatttatttcacttaatggcctccagttccatccttattgctgcaaaatacgtaatttaaatcatttttatagccgagtaatattccaaggtgtgtgtgtgtgtgtgtgtgtgtgtgtgtgtatgtgtgtgtgtatcctgtttttttaatcagtgccccatgatggacacgtaagttgattccgtgtctttattattatgactagtgcagcaataaacatatgagtgctggtatctttttgataaaaattatttatttccctttgggtagaagtagtaggattgtcagattgcatggtattctatttttagttctttaagaaacctctgtatttttttgcatggtggttgtactaatttacattcccactaacaggattgggaaaccatctgtaaagggaacagcattcccttttctctgcatccttgccaaaatctgttgttttttgaatttttaataatagtctgactgctataaggtggtatctctttgtggtttccattcacacttctctgatgacatttagcattttgtttatatgtttgttggctgcttgcatatcttcttttgaaaaatgtctatgtcctttgcccactttttaatgggtttctttgtttttcctcctgttgagttgagtttcttgtagattctggatattagccctttgtcagatgtatagtttgtaaatattttctcccagggtataggttgtctgttccctcttttgattattcctttggctgtgcagaagctttttagtttaagtccatctgtgttttttcatttttgtttctgttgcattagctttttttttctttttttaaaattattattatactttaagttctagggtacatgtgcacaatgtgcaggtttgttacatatgtatacatgcgccatgttggtgtgctgcacccattaattaaggacttggttgtaaattctctacctagatgtccagaataattattcctaggttttctcatagaatgtttataggttcatatcttacatataggtctttattccttgagttaatttttgtatatggtgagatgtatgggtctagtttcattcttctacatatgactctcaaatattcccagcaccatgtattgaaaatggtgtcttctctggtgtatatttttgttgactttgtcaaagataagttggtttttggtatgtggatttgtttctgggttctccattctattccattaatctacgttcctatttttgtaccagtacaatgctgtttggtgactatagccatgtagtagtatttgaagtcaggtaacgtgatgcctactgctttgttcgttttgctaggattgctttggctattcaaactatttttgtctccataaggtttttaagtattttttttcaattctgaaattttaagattgtcctccactatgcttgatccttttatcattatataatgacatttttctgtcttttttactttatttgatttcaatactattttatctgatgtaagtatagctactgctgcccatttttggtttccatttgcatggaatattttttccacctcttgatttacagtctatatgtgtctacaggaaaggtgaatttattgtaggtagtatagagttggattatgtctttttatccattcttcagtcttttaggtggaacatttaatctatttacattgagtgttaatattgatgtgtgaagttttgttactgtcacgtcattgctttcaagttgttttagatattgtttgttcctttctctgttttctttgtggtttgataaaattctgttgtgttgacatttgattcctttctcttcctcatttgtgtgattgatttataagaattgttaggattctatttgtgagtgttttagtcatagcaaatattgaccttcctttctatttttttttaatctgggtacataagaggtgcatatatttatggggtacataagagattttgaaacaggcatacaatgcataataatcacatcagagtaaatggggtatacatcaacccaaatatttatcctttgctttacacacaattcaattagactcttggttattttaatatgtacaataaattaatagtgattatagtaatcctgttgtggtgtcaaataccaggtcttatttattctttctaactattttttggtatccattaatcatctccacttctacccacctgcccactaaccttccaagcctctggtaaccatcctattctctatttccatggcttaaattgttttaatttttagtgcccacaaataagaaaaaacatgtaaagtttgtttttctgtgcctggcatatttcacttaacataatgaccaccagtttcatccatgttggtcatccatgactgttgcagaagttttgagaagtgatgtgattcatgggaacaagattttcttatgctgttctcatgatagtaaataaatctcatgagatctgatgattttaaaagggagagttttcctgcacaagctctctctctttgccagccaccatccatgtaagatgtgacttgctcttccttgccttctgttagattgtgaggccaccccagccatgtggaagtgtaagtccattaaacctgtttttcttcctaggcttgggtatgtccttatcagcagcatgaaaatggactaatacaaatatgctgagttaagtcctggacaaggtaagcttgagacacctattcgatttccaaatacatatgtcatatgtcaagtgagaagctgggtatataggtgtaaagttcaaggcagtaatccagtctggatatataaatatgtcatgtataaaatttaaagccatggcatagaatcgtatacaaagaaataaccacagataacaagtatacatgtagaaaagaaaagaggttcaatattaaaagtcagggacatgagggacaatcagcataaaagtcagaggatttaccagaaatactgttaaaagccaggcaagtggttgctctggatgcaccaaggaaaggatatatcaaggcagaaagaataataatctatatcgagtataatgatagctcagtagagatgatgatatgggagaagagcagaaggatcagcctaataacattagatattgaaagtttgtttccaggacatagggaagaacaacaaaaggaacagggaacctcatctattcaacagtgctccttaggattggttgaggaaacccaaaacattatctctggctcttccacttttatttccaactaatccccttaaaatgttaatttctaatgaacattggcttttaaatctcttccctttgcctcattgccctctgtcacatggccctttcagccatggctggagtggctgggatgcagggcaccaaattcctaggctgcacacagcacagggaccctggatccagtccaagaaaccactttttcctcctaggcctccaagcctgttttgggagaggctaccctgaagacctctgacatgccctggagacattttccccattgtcttggggattaacattcatctttatctactaaatacacagtcttataaatgatatagtttctctatgggcaagtcagggacaactaatctatttagcaaaatagtaaccatgcttaggacccatgatcctcttagggcatcatgaaaatattttcatttcctttgaaattagaatttataaaatgattaagtctgagaaagcatttccacatatactgctgatttattttaagtcaatgtagttgtaaaatatttttatacttttttaaatagtggaatgcaccttgaagaaaaatgtgcctgtggccaattatttcataatttgcccctggggccatacgtatattgccccatagtgaagcaatgttgaaatggaggtttattcaagacatttccctccttcaaatccttccaaggaaaaatgtctcatatttagttagaactaactctttagctttcaaatggcctttctaaatctttcctctaactaggattcgagattttttttttcttgtagagatggagcttcactgttgttgcccaggctagagtgcaatggcacaatctcagctcaccgcaacctccgcctcctgggttcaagtgattctcctgcttcaacctcccaggtagctgggattgcaggcatgcaccaccacatctggctaattttgtatgtttagtagaaggtggcatttcatcatattggtcaggctggtctcaaactcccaatctcaggtgatccacctgcctcggcctcccaaagtgctgggcttacaggcatgagccaccacacccagccaagattttctaatattgcatcctcttcctcctttcatagtctctgtgccataaccacacagttggttttcttggtgcctgccctacagttttcctcttatttctattaactagcatcaatttctcttcacctcccctctattaacatatgttcctattatacctttaacagtttaaaatctatcctgatacaataaaatgttccataatcatacactacagaaatactgtatcttctgaatatctgtaagtttctctaaaattatatttatttatgtgaatatctaagaatgcagagatggctaattgcttaattaatttacattgttctccttcttccttattaaaatctacaatatgcttccataaaatatattttttgcttcccatataactaatttctgacatataagatttatgtagacattattgggtgggacttctaggaatgcaccctaagaagtgaattgttacagttggtcaattgcttctcggggttttggctaagatcacgtgtagtatcagctggtgtgagcctttcgttctttgtcttcctgaaataccaattcagtgcttcatgtgagtcatctcacttgcgaccaggacgtgataagcacatgttaagtaaggatgactgagaggtaaaacaggaggagccttggtcccagttgacattgtggaattgttctggactccctaacagcttaccttcggaactttttataaaaataaataaataaaattctcttctatttttaagatactgtggggttgcctttgttttttttcccagtggaggataacttttatagttgatccttgagcaacacaaaagtgaggggttcaaacccacagcacagttaaaaatccacatataacttttgacttccacaaaacttaattatgaatagcctgctgttgactggaagccttatcaataacttaaaacagtccatgaacacacattttgtatgtgtatcatgtactgtatttttacaatgaagtaaaccagagaaaagacaatgttattaagaaaataatgagataacatatttaaaatatatataaatatacctaaattgaaatgaatcgtcataaaagtcttcatcctcgtcatctttacattgagttggctcagaaggaggagaaagaggacgtgtttgttttactgttgcaagggtggcagaggcaaaagaaaatcagcatataagtgggtccatgcagtttaaacctgcggtgttcaagggtcaattgcactcatatatttacttgttccttaaattataaaatagtctagcctgagttttctgggattcatttatggggttcacccagtgctttttaagagctcagtaactcttcctttgacagatgaaattagaaatatgtatgggcatttaaaaatgtttgtataagaacattctagcatttatggcatgtcaaatatgagatatttatgtttcattatttaaatcgtgagtgtacccactgtagacattgatatatatatatatataatatatataatatatataatatatataatataatatatataatataatatatataatatatataatgtaatatatatgatataatataatataatatatataattaatatatataatataatataatataaataatatatatttttttgctcagcttggctctctagaattaccctctgcctcctcatcaacatcttacagcagactcagtcattttccgatccaacccaatcctctgagcacacctgagtgactcgagcgtgaacctctattccaaactagcccagtcaggtttcttcctcaggcattttagagctggaattgagaaagaaaatcctagacccctttggatgactggatataaagccccaaaacaattaaagggtaaatttgatgctaagtgagctagaaatttggggaaggaatctttgtaaagaggcctatgaagcagatgaaagaaaggaaaaagaggtagtcctcacatcatgggaatgccagtttccagttatgcctttcacctaaaagcttctgtgcatttagattccacaaaacatactactatttttacaatgtcttcctgtgtctatataattttaatttaagctttttggcttttgtgatccaaaacagcctaactagaatggaaattgtaaccaaaagcagagtgctatgaatgatagaccaaaaacgtacaatttgtcaattcaagacatgatactgttgtaggaaaaagcaggttcttgtcacacaaccaggaaaagttaggcacacagatatattgaagggtgagggggaatggaatttattgggaaaaaaagggggaaaaaatctctgtaaagcaagagaggttcctgttaacaggccctcatctcacaggttgaatcccaggtcaccaccgaggaacaggagaggccaggctcctaccccctgcagatggcacaaacttcccgaggcctcaccccatccccccaatgcacaggtgggcattattcagaaacaatctgttgggaaagggtgggcttcatccaggactgtcagactggtttttcagcctccaggctgtttttttgttctgtttttttgagatggagtctggctctgtctcccaggctggagtgcagtggcacgatctcagctcactgcaagctctgcctcccagattcacaccattctcctgcctcagcctcccgagtagctgggactacaggcgcccgccaccatgcccggctaattttttcaattttttagtagagacggcgtttccccgtgttagccaggatggtctcgatctcctgacctcatgatccgtccgccttggcctcccaaagtgctgggattacaggcgtgagccaccgcgcccggcccaggctgttttaagactgaaggtggggttttgtcggggcacccttgactgcctcctgtctttaccattcacccctttaaagaagtacatctgactgctgttagaataaggataagcacaggttgaagactgatgttaactgcttattgctaacaggggatgctcttttgggaaaatggtagtcagagctccctcagaggcctatttaaggtttcccagctgaaggagccatcatgaggctccagctgtgaccgtttggagtttgatggcctgaaggtaagaagaaacaaaccaggttattagaaaacgtgtatcaaaacaacacaaggtgggaggaggacagctcaagaatcctgaaaacttttaccagtttagtacagggagaggggggccaaaagcctgactaggagaaaaatgtttacccttttgcctgcatgttaggcttctgggttcccttcccctgagccaagtcctaagccagccagtttaaggtttggtaaattaactcttcccagtttggaggatgcatgtgagtggagcatcccatattacagagacacaattacctgtcagtgaagaaaggacagaggaagaaaaagaaaaaataagccatttttacaaaggagtcctagggattcaggatgcattcgaaaggggtaagcttggcttaatcggcaggaatcagtcatactcacctgcgttgtgccttttaacttccattattatttacctttggatccctcaaatacagtttattttcctagggctttgacccgaagcttggaattgagtttgggaaaaagaatgtctgcggggttgcacagactccttatcataagccaggtgctaagatgaagctgtagaattgagtcctcctccaacaagggagagaaaaggatgtcttgtgtcaaaattctatagtttattataaaccatcttttgaaaatgattaaaacaagacaataattgtctgtgaataataaaatgtccagggtagttacagttagaaacacaattgacaaagaagtttggttgtcagtgtggtttacaataacttaacatccttaattatgattgatagcatatactcagacattagaattttagaaatccgatacaattttggaacatacattagttgaccaaaatattattgaccaaaatataacctgaagaagactgaacaccattttggcaatctcatgtaattgaagatgtctaataatcctgtttatttcccttttggaaactccaagggccctctgaagcatccaacagccaggtatcaggaaagacaattttgaaactgaagtttgattttgggaacccttttaaatattttagaggtttaaaacacttgatgttatgaaacagaattccacattaccataagttgtttattttgccaaaatgatgactcagatatttaaaatgcaaaaaaaccctttataatcctgagcatattagtgccttacgagtaccttgttgtgcttttattttaatattcactttgcaggaaaaccatataataccctttgaatgaagtcagtatgttcacacacagaatttttgcaagactaatctttataatccttccacctcttgtttgatcttttagctgtatcttatataatttttaaaaaaattttaaccctagatgagaatttacacctttttgtaatattttaccaaaaacacattttattattcttatacaccttgcatgtaaatctgtttctagtagtttcaattacatgttacaatggtaatgcctagcaatttttaactttaatgtaaaacctggtaagttgttttaattatgtgctaggtgcagccaagatttgacccctttcagcaaaattggggcatggttagttctatatgtccccaagccttaccaattgtggagcaggcaagtcaaatagttctcaaaacccagaaagcaatatataaccttaaaacatttagcaaacctagcatctgacctgcataatttagtccacctatttatattgacaacatctgctttttaccaataatttttaggctgtttttatttctcaaagattaaagtcatatgaaaggtaccataccatttatcttccctttaaaaaatatttgatccaagcacttatcttcctttaggccaattaattagagctctttttataggcatcacacacagcacatatataagtacacacccaccaccacgcccagctaatttttgtatttttagtagagatggggtttcaccatgttaatcaggctggtcttgaactccttatctcaggtgatccaccagcctcggcatcccaaaatgctgggattacaggcttgagccactgtgcctggactgattttagaattgtcatcaatttttatggactagattaggggtctgcacactatagctctcctcatgggcaaaatccaacccactgcctgttattgtgaatcaagcttattgggaacattgtctaatttatttacttaagtattgtctgtaactttttccacattgcagggcagagttgagtagctgctacagagaccccttggctagcaaaaccctgaataattactatctctctctcagaaacactttgccaacctctggactagactgagtaaagcaagcagaaagatccaattttaaaaagaggtgaggaaaatgggacaacttggctatggagagagcaagaagaatgcaactgatgtgcacaaagtttgaagacaaagttactcaggtattgaaaacttggtcccatttgctcattagtctgaacacacatctgcccttatgttcaatgagaacacatgaataacttaaataaatttcctttatgtgcttaagctagtttgaaatggatttctgtgccaagaattctcacttagatagtgccaacccaatgagcacagaattggaatgtctgattcaggttatgactggaatactgattgcttctataagataaacttccttgagatcctcaactatgaagttgttctaataataacatctgtttttatcatcttgtttttgtgatggtcaaaggagtttaccaattttaaaccattaaacatgtacaaactgtagtgtagtgattcatctacagacacagtggaggtagattcatctacctccacattctggagggtagtctgaatttttgctctatcacttcttagctgtctgactttaaataaattgcttaacttccctaagatacagtccctttttgtgaaatatagttaataaggatcttgtgaggaatagggaacaacaaatgtaaagtatatagtgccataaaaaaggacttactaattattagctgcaattgttatcatccttagagatactgattgaacagagataaagataataccttttctcactatgaaaaaaagcaggttaaaaacattagtggttcctgcataaaaagaacaatgattcaactattatcctcattttaatatgacctagcagcctgtggtccaaagtaggtaggttacctgtctctatgcatagtgagtactggcctggtataaaaacatctttcagtaaaacattgtgaaataaaatacttttgctatggtacatacattgcatttttgaaacacatgtgaatttgctgtcgtattaagttgatcctctactttttctgtttatacaatgagttgctaaaagtaagatatgtctgagataaaaaaaaagacagcatgaagtttaaggcatggtcccacttgttacattatactaaagcatttcaaggtttgtttaaataaatagtcactggagctgaatatcactttggcttactgcattattcctatctcaataatctttatggttcccataccaggactgtatggatttcatatgcaaaataattcattaatgagaaggtgttttatttttcttctttattatgaaaagagactatctcaagctacttgctcagaaggaggttttaaaaaccaacttggaaatattcagtgtcattgtatttactgctagaattccaataaaataaatattaatttatggaaccaacttgctgcatttaaatttagaagagatagcattcaaactaggagaaacaaacaataaaacagaataacatagtgataataaaaatataatgatttacaattgtacatgcttaaaattggaaatatgcatagaacaggatgtggcttgattttagaaaaccaaggagattttagacaacagaattaaactgagatgatgaatttgtattattctccttactctttaagtttgatgggtggtgaagaatatcattattgtctgttatctgttagagcctcagcttaacagattttttcatttttccattgtaacagtttagatcaggggtccacaacccccagccatggaccagtactgatttgtggcctgttaggaactcagttgcagtaggaggtgaatgccaggtgagtgagggaagcttcaactttatttaaagtcactccgcattgctcttgttaccacctgagctccaccttctgtcacatcagctgcattagattctcataggaatgtaaaccctatagtgaactgcacttgcaagggttgcatgcaccttttgagaatctaatgcctaatgatctgtcacagtctcccatcatctccagatggaactgtgcagttgcaggaaaacaagctcagggctcctgctgattctacattatggtgagttgtataattatttcattatatattgcaatgtaataataatagaaataaagtgcacaataaatataatgcactcgaattatcccaaaaccattacccccactgcgcccagtctgtggaaaaattgtcttccatgaaaccagtccctggtgccaaaaagtctgggggctgctgatttagatcacattggtttcaagtaatggggattaaactaagtaagccaaaggagagcatttattttaaatatacatgaatataatattaaccccaaagagaagggaagacaagaaaacagcaactgaaaagtcttcagaattttattcttcaattatatattcctctgagaatttgtgtcatttgtcactgtcattgccatcactgttctctgaagactgactgtcttgctatttattttgtaaaaatatggcttcctaatatacttcttttcatattgagatgagaggttttcctgactacccctcttgcagaacatgtgacagggatatggttcacctgttcagcctccgtgtgcactcaaaccctttacaagaaggggagcacagacatgggtaaggtgcaggagctggggaaagtgccccagtgctcctgggttccagccctgtggcagcatccaggagtgggagcccatgacccccaaagcccacgtgggcatgtgttacagggtgtttttttagccttactttctgtggacagcttaagtgttaaacagctcagtgccttcttggtacccaggtccttgtccagcatccaagaagaattgggttacaaatggacttaaaggatgaatgtggtggttttactcagtgctggaggtgactctcagcaggatggatggggagatggaagggggttggagtggaaagatgatcttcacctggagtttggccatggagccgccaatctcctctctgatcatccccagcgaaactcctcttggtattcagccactccttctcttctttccttctctgccatgctgttctgcaattcttcgattttctgttcatctcctcatctgcttctggagcctggggtctggggtttatatgggtacaggataggggggtgtgttgggtcagaaggcaacttttggatgcaaaaacagaaatgcctcttctcacttcaggccacgggttttcaggcttgagggtggtgccttttctgaggaactgccctcttttacacagtatttcctctctcctgtccgtgtcaacatgcagacactgaagagctataaaatccacgtacaaatgtctggaagagagaatattgttggcctatcttgagttggtgtctgtttccttgggtattcaatgaaaactgagtgacaaagtataattctggctaccaggagctagccctgtgaatcagaaatccattaaaagtgtttaacagaaactgggcaaacgcttccctcctccacatcaaaaataaattggaacctttggcagaaacctagtgtactcattaactatcacccgcaccctgggcacatagagtaaaacactactccttccacaacaaagaggattaattttcccgtattaaaagatgtatccttttccagcaaagctctgaagcctacacactcaaaggtcagacacataatgtagttgaggacctagttgaagaatgcctgatatcaatcatatgggcaattaggaggagaaggaggatggtgtatacatgggagctcaaaggggcctgcaggtaggagatagcctgtcctgagctctagccaactattgccctccaggaatgcaagctgtgtcaccagaccttccgatttttctggagactcctggattcagatccttacattaaatttttctatttaaaaatgataggaaatcattcaaataaaagttattaggtgtgaaaggaaaataaatattaaagcccccaaacactaagctaaaatgaaagtcaagctgggaactgcctaggggcaaacctgcctcctattctattcaaagtcatccctctgctcactgagataaatgcgtatctgattgcctcctttggaaaggttaatcagaaactcaaaagaatgcaaccatttgtctcttacctacctagaatctggaggcccccttctgaaacaagccaattgtcatcttacatatattgattgatgtctcttgtctccctaaaatgtataaaactgggacgtgcacagtggctcacgccggtaatcccagcacttcgggagaccaaggtgagtggatcacctgaggtcagaagtttgagaccagcctggccaacatgggaaaaccccgtctctactaaaaatacaaaaattagccaggtgtggcggcgggcgcctgtagtctcagctacttgggaggctgtggcaggagaatcacttgaacctagaaggtggaggttgcagtgagccgagatcacaccactgcactccagccaaggtgacagagtgagactccgtctcaaaaaaaaaaaaaaaaaagtataaaactaagctttgcatcgaccaccttgggcacaagtcgtcaggacctgctcagacagtatcataggtgcacatccttaactttggaaaaatgaacttcctaaattgactgtgacctgtcccagatattcagggttcacataggtaaacaataatatgtttgggacctgaacgtatctcagtgccactagtttttgaactctgatctacatgcttattaagcaaatgatagaatgaatgaatgaatgaatgaattatattgttttgatagccttgattgcttatctccacagaaatgctgaccaaatcctcctgaaatgttcataccttagggtgaacttttaaagtgtaactaaaagtctcagcaggtgcaaaggggtaaatttacctgccagagtaagtttatctcttacataaacgtgtttttttccctaacacacctggctactctgtgtaattcaacataggttaacctattgattataggccaaccaatacaaatccatggcccatcgtaatgcttacagacataggactgtgaaagattattaaagaaaaaaaaaagtaagtcctgctaggggaaacaaatggaatagaattggtgccaaatctttagcaaactgctccataggccataaaggcatgaatagtttcatgactgttccaatagatgtcagctaagtgccacctgagctgttctgacaaagctaaaatggtatgtcacagcttcatgtttcacctacaaactagaacagtgctgagaaagcatctagctactatataaaagctaagaaatacatctactttgagtaatagaggacagttgatatttcaaaggatggcatacttgggatactgtcaaataaaatagcttgggtaacttccttgtaagattcctactcttgcatagccaagaggttgacatattgtaacaaagctttcattttaattaccagtcagatctcacaggacattagcatttaacccatgaacaacgttgctcttaaaaaatgtttccctttgggaatacatcatttaattcctagctgacaccttctctgtacttcatgataagagaaatggcatcgctagtgagcatacttgtaccacgtcttgtaggatctgatgccagctccctgatacctcacacatgtctcaacatgatgatccaaatgggtgaggtggctctggggagaagctctatttaaggaatcaccattttttttctgtcatttttctgtctttgagattaagaaatacccatcacacagaaatcatattgatacctgtgcatgtcaataatgtctcctcattatcagctacctcaactgcacatattttggtgtgactgtcaagtttcttgtattctttcccaggctggctgactgagtttctcagtcctctcaccccactgtctttgggaatgttgctcatattttcatccttacaatatcttctttccctaatccaatcaaatttcagtgcaacaaacattttgaatggacattccgtaaaatttgagtatggctttctctttgctaattaattgcatatctgtcatttaaggtcccactcaagtctcatgtcttccatgaagtctctttgcatggagcttgattgttttctaagtaatgcctcttaattctccctctccactgcttcagaatccaactgatacgttttctcctctggttcttctgtgttactcatttaggctacagggcctgaactatccacttcctccgctaaatattctcttgattctaccctcacttgatttattttctctgatttcttctcatacttacatttatattttataatatgcctatttacttattaactatatctataccttggtatttccttgagagtaggctatatctcatagcttttcaacctgtacaaggagaaaagaaggtgcacaaaacatactaagcaattaaacaaggaagaaaaggaaaagagaaaaaagagtacgaggaaaaaggacactttttagagattccagaaattgaaatatctctatcatcaatactgagtctcattattagtctgtcacttctaacttaacgtataagaaaaaatgaaaatggtgttacttgattcttagataaagcctgagttaaatgtgcattaagccatgttcaaatttactaaggttttaatttccaaattaatttgacattttcactattgcatgtttccaatgtgcatattattccatagattaattcttgctgtcttgtttaagtaggttggctttcaggatatcacttgtaatacttggctaggctatgcaatgaaatttatgatcctgtttttctgggttgagaacattaatatttttatttaatttagcttctgtccctaaagagtgctcagaaaatgaagcactttttaaaatttaagtttattgcacctatattcatctcattttatgggaatattacaggtcagcaaattacattttagttgcacttttctagtgtcatattattttcaataatcaataattatattagaagagatgtataactaatttttcatttgaggaggtaaaggaatgtttcaaatgtattggataaaaacttagttaggctgacatttgttaagttcttggcctgattaaacatagcagctgtcagtttcacataaggagaaatgaacattgaatatatttgaaactgcctagagtgtggcattaataacatttttcttctttgtttgcttttaaacggttttttgctcaaaaagctggaaaagacaagtgttctgatgacaggtttgtaaaggtttgctaattgtgtggttgataacagtgtggcatttttttttttttttttacattagagccttagagtctcctactgagataataccatcattcaagtcttattgattgccatatgtttaaagagctcactatagttccggatcctgctttttgaatattatatgaaatgaaactgggtcctgggttacacatttctacaaattggtaaatttgttagtctattttccatgctacatttattatctctcttactattttcatttatagtacttgaatttgacatgaagaaatacatttataaaattctattctgaggatctgggagtttgattatatgcatttgctcccaaaatttcagtaaagtcatcccattacctttacactaaagtaattccaaagataagttaagtaaagtatctactggctgagaggagggccttttggtctgtttggtattgctataacagaataactgagactgactaatttataaaaaaaaaaaagaggttcatttgcctcacagttttggtggctagaaagtctaagagcatggcattggcatctgcgtggcttctggtgatagccgtgagctgtgtcaagacttgaagaagaagcagaaagtcaagggagagtatgcaaagagacatgcaggacaggctgggatcctttaccacaacatgctcttttgggaactaatgcactcccacaagagcaataactcactcacttccaaaagaagacattaatttattcaggaaggatccatccccatgacccagcacttcccattaggcctcactttccaagtgcactacaacagcaatcaaatgccaccatgagtatcagatgggacaaaccatactcaaatcagtaacaaagtcagactttaacaccagactaccaaataacaagatccagaaatctaatacatccagaaatatattgttgcataacaaacgaccctaaatcttagtggcttaaggcaacaacatctactttgtttaagaatctgggcagtcttggtggaacctgcttgtttcacatacttcacattgactagggtggctgaaagctagaagttgaaatcatctgaaagtcactcactcaaatatctggtgcctgggctggaataactcaaacatctgggtgtaagagagtcgtgacatcttggatttctctatatagctctatgtgatctccccacatgatctccccacatgatttctccaagatagtggtttcacgatagctggatttcttatatgtagtctcagggcttccaaggcccgtatctcaagagagaaagaaccaggaagaaagcagaaagtattgctctttattgtctgacttcaaaaatcactcattggcacttctgtctcattctctttatttaaaaaaagtctctgaagcttcccatattcaacagaaataaaaaattaaactttaccttttgatgagaggtgttcaaagtattttagacatacttaagaccacacagatatctgaatattttatcattgatatgaatataactgaagcatatatagcaaggtatgttattcaagtatttctggaccctctacagaaatatttctcaatgctaaaacaccatttacaatattcataatggttttctgaaggtctaactacttgcattcttactacttaatgttttatagtcaaaagatttatttttacatgaatacaattattttaacagggatttgtgttagcttatttcctttgaaaagtggacaccaaaacagaattagctgtttaagagacgtgtggaaactttttcaaggttaaaatggagggaaacagagaaagccaagggagccttcagaccatgatgcaagtctgtcacctgtgaaagaggaagaaatgagaagttaaaggaagagcgtcatagtataacacagttccaatagaggtttgaccaggtcaatcaagtgttgttgagccaaagtcactgttgtggaagactcctgtagcttgcagaaataagcacgtattaatacctcagcacactcagtcactggttgtgaatggcccactggaagtgtgacttgggttgaactcagtggtagatcaagcagagacagccttgtgggttaattatgcctctaattatactttcccatattaagagataagagtggcacatttatattgttcttatagaaacattatacaactatagtaaaataaaactacactgcatattaatacagaccttgaccataaaaacaaacataatgaaataaaatgatggacgattttaaaagtacaatttaataaaattaggattttacttcctgtaagattaaataaatgtattactctgtttcctctgccagctggtaatgagacctcccctaactcatgagacccatgagtagtgtcagtgaagaccacatgagaagtcaagatttccacctttgcctgaaaataacaaggactccttcctctctttcctcactggggtagtatcagagtagttaggagttttctgagagccagcagtaacaaggctatctcaccatgttgtcagtggagaccacatgagaagctaaaactcccaccccctcctagcagtagtgatgagcccaaatctcttgggtatcaatagtggcaccatggggaacacagactcctacttttccttctcctacctggcataataagacagtgccctccttctcctatgatagtagtgtcagagaaagcagctaaaacagaagatttaaataaaatctagtctcatattatggtacaaaaatgtctaggtggcaataaaaatcatttgttatacgaagagccaggaaggtctcaaactgagtgaaaaaaggcactgaatagatcccaacactggaatgacagagatttcagagttatttgacaaagattttaaagcagccataataaaaaatgtttcaataagcaactccaaaaatgcttaaaacatgcaaaattaaaaagcctcagcaaataaatggaagatattttaaaaattaaaaatatgtataaatagaacatataaaagctgaaatttaaatgcacacacacagacagtggattggctcaatagtagaatgaaagaaacaaagaatgagtgaaatgaaagttaaaataacagaaattactcaatatatatgggcaacatggaaaaaatagaataatggagaaaaaaaagaacagcatcaggggcctggaggactagaaccaaagattgtacactcatgacatcagagtctgagaaggggaagagaaagaaaatggggttaaaaattatccaaataaataatgcctaaaaacattccaaatttggagaatacaaaaatttacagattcaagaagctcaacaaacctcaaacaaggtaaaccaaaattagctcatgtcaaccaattacacttaaaattttgaaaaataaaactgaaggcagtgagggagacacagcacactacctaatttggagaaaacgtttgagtaaaagcaaagttctcatcaggaaccatgcaggccagaaggaaatggcacagagctcaaaaagtgctgaaagaaagaatactcaaccccaaattctaaatctggaaagaccatttttgagaaatgaaggaaaaatgaaaacgttcttagataaagaaaaaccatcagtattttattttatttatttagttttttggagacagagtctcgctctgtcactcaggctggagtgcagtggtgtgatctcagctcactgcaacctctgcctcccaggttcaagagattctcctgcctcagcctccaagtagctgggactacaggcacgtgccaccacgctcagctaattgttgtatttttagtagagacagggtttcaccatattggctaggctggtctcgaattcctgacctcatgatccacccgccttggcttcccaaagtgctgggatgacaggcatgagccaccgtgcccggccccacgagtaatttattttttttttttttgtcatcagacctcttcaaaaataatgactaaaaattatttcaacattaaaaaaagaaaaaaaggaatcagaatatcaagatagaagaaaaaacatagtaaacaaaaatatgcttaagtgaggtgaggtaggatttttctttttcttttcagctttctaaatttttgttggttgaataaaaaatgatttaaggtagttattaatatattttatatatttataatatttatattataaaatggagaggctaagggaatgtaaagggatgtaatgcttccacaatttgttagaacttgtgaaatgacaacattttaataaacagtgttaagttataaacatgttataatacgtagaataactactaaaacaagttatgcaagaagacatgaaaccacatttgcaaaaattataactggtgagattataacagtgaaagagattagacctaattgactccatcttgtgtctaacctttaagctttccttgttcattcctgggcataggctgaactaactgggaaggaattctctgaaacaaaattgataatagccctttctcaagaagatcctcttcatccctggtgactagtctacctttgaaggactaccaagattagaaattatggtttagggtcaagcagcctctggctccaagagtctaaacctccccaaattgctcctgggtataacatcaatattgtaaaacttaagatcagtgcttcagatattatgcagaccctacacttgatggattagctgacatcacccaggctgctaatctggtttaaccagttctgccatactccccaggaatggaagacagcaagaaaacctctcttcgaccccctgtgattccgtctccaacctgaccaatcagtactccctacttcccaagcctctacctgccaaattatctttaaaaactctgatccccaaggcctggtacagtggttcatacctgtaatcccagcactctgggaggccaaggaaggtggatcacgaggtcaggagatcgagaccatcctggctaacacggtgaaacctcgtctctctactaaaaattacaaaaagttagctgggcatggtggtgggcacctgtagtcccagctactcaggaggctgacgccggagaatggcatgaacacaggaggtggagcttgcagtgagccaagattgcaccactgtcctccagcctgggcgacagagcgagacaccgtctcaaaaaaaaaaaaaaaaaaatctgtgatccccaaatgctcagggtgcctgatttgagtaataatcaaactccagtctcccacacatccagctttgcatgaattaccctttctgcattgcaattccccatctttataaattggctctgttggctgggcacggtggctcaagcctgtaatcccagcactttgggaggccaaggtgggtggatcacctgaggtcaggagttcaagaccagtctgaccgacatggtgaaaccctgactctaataaaaaaacaaaaattagtaagtgtggtggtgggcacctgtaatcctagctattccggaggctagggcaggagaatcacttgaacccaagaggtagaggttgcagtgagctgagaccaggccattgcattccagcctaggcgacagaaggagactctatctcaaaaataaataaataaataaataaattggtcctgtctaggcagtgagctgagaccacgccattgtgctccagtctgggtgacagagcgagactatctcaaaaattaattaattggctctgtctaggcaccaagaaaggtgaatgcattgggtggttatagatgcataaaaaacactatagaaaaattaaaatagatatctaaaggaagttcaagtagccaacagaaagaaatgaagaagagaaacagaaattggaaattaaaaaaaaaaaaaagatggcacacttaagtcctaagagatcaataagtatattaaatgtaaagggaaaaaacatgacaattaagagacaaggactggcagaatgaatttaaaaatgtgacacaacgatactctgtctagaagaaattcacttcaaatatgatgtttgtcagtttgaagtacaattatggagaaaattataacatgaaaacattaatcaaaggaaagtaaaaatgattatattaatatcagacaagatagacattagagttgctataataataatggaggagcattttataatggtaaaatggtcaacctaccaagaagaggtacaattctaaatgtatgtttcctaaacaagagattcaaatttgtaaagcaaaagcttatattgttgtgggaatcaggagaccagagagaccaataggtggaacaggaggattttatttaggtgcacctgctcagcagattcgcatccaaaaggctgagccccaaacaatgacagggcttgacttttatacaggcatctgtggcgtgaaacacagtggcacaaaatcaggtttacagaagcagaacaaaggcagtttatcaatcagtgacaagcttataactcaggcctacatgtgactcttgctatgtgggccaggtggctgtgctcaatatgcctgcacaatcttatctcgtgtccttcactatggcacccaggtggctgtaatctaagcttgcttaagcatgtctcatgacctccatggtgctactcagatgaaaaacagacttacagacactagttatagaaaacaggaatctataaacacataaagacttgaagaccagggtacagtcatatggagggggtaagtattcaagaggaagctgttcataccaaaggaaagaaagaaagtttgtttttcttcttgcatcttctgcttcaatataatcaaattcaaacttgaagatggaaacctcaacatctctctattaaccgttgacagactaatcataaaatcagcagatcttaacaacccattaacctacagtgtcaaattgacatttatgaaacactccaaccaacagcagggtagacatttttgtgctcacctataggaagatagatcataatctgtgacataaaacctcaacaaatttttttaaaattaaattatacagtgtttatctgctcatgagaaatcagtcttataaaaataaaagggaaatctccgtatacttagaaatgaaactgcatactttttgtgtgtgtgtgttttttttttttttcttttttgagatggagtcccactctgttccccaggctggagtgcagtggcacgatctcagctcactgcaagctctgccttccgggttcatgccattcttccgcctcagcctcctgagtagctgggactacgggcgcctgccaccgtgcccggctaattttttgtgtttttttttttttttttagtagagacggggtttcacttttcacaggatggtctcgatctcctgacctcgtgatccgcccgccttggcctcccaaagtgctgggattacaggtgtgagccactgtgcccggccgaaactgcatacttttaagtaattgctggttcaaagaggaagtctcaagggaagtcaaataatgcatgtaactgaaataggaattttcctataagaaaattaaatttttattaaagaattttctacccacaaaaatcttcaagcccacatatttttgctggataattttaccaaatgtttaagaattaagaccaatactacatattttttgagaatatagaaaaattgtcacttcctaattcattttgtgaatctaattttaccctaattcaaatcagagaaggacagtacaaaaaaaatgaaactctagaccaatacatataaggcttatagatatttgcaagtcacatgttcaacaaacgaccagcatctagactaaattaagactatttaaacctcaacagtaaaaatcagacaaataatgcaatttgaaaatagtaaaaaggcataaggagacatcaaagaagaaaaataaacacttgaatggtgtttatcatcaatagttacaagcaaaattcaaattataatcacaatgagatataagaatatctctatcatatatacacacacatatatgaagattatagacatcttttatgcaatttttttttaggaaatatggaattacactgtgttttgtaattagttacatatttacatttattggaactctttttgttttccatgaaaatttgaattactgttatcctgaagaaatgttttgtactttttatgaggcatttctgctagcaatagaacttctcaatttttgcgtgtttgtttgtttaaaatctggggatttaaaatttacctttttaaaaaaatgttttgctcaatataatactatttaatagtttttgtttgtttttgctaactgcactttgaatatgtaaattacactactttttagctgctattgtttttgatatgaagccagttgtcaatcttattggagttcccttgaatgtaatacatcatttttgccttattgctttcaatattttgaatttatcatgtctttccatgttttgatcctgatgtgtctgtgtgtgaacctctttttatttatgagaattagagttcactgtgctttttgaatatgtatgttactgtttttcattaaatttaaaatgctatgagccatggtttattagaatattgtttctgtttctttctttctcttctctccttcttgtactcctgttacacatatgttgaaatgcttagtggtgtctcatatttctctgaggctatgtttattcttcatttttctttctgtttttcagattccagaacctctattgatctagcttcaagttcactgatttttccctctgtcagctcaagtttacagtacaattttccagtcagtttctcattctgcgtattgtacttttaatttccagagttttcacttggttctttagtataatttttatctttgttgatattcaatatttaatgagatactgtcattagacctttccataattctttcagcatggttttctttagttctttatatatatggatattttaaaaaatagctgctttgaaatctttaagtctattctctagaactcttagatggcagtttctaaatttgaccctgcatatgttatggtttcctgtttctttgcaggtctcatgtttattattgttgttaaaaactggctattttagatcatgcattgtagcagcttatgatagtgacaacccctggttgtcactattggttcttgttgtttttttcttaatttttgtttgtttagtgacttggtttaactgattctacagcgtgcaacctctgatgtcactactcatatttcttcaccttgattttctctttcagcttggctacctaatgtttatctttgtgtaagtataagccagttattagtcaaatgttctctgctctcttattttcttgcatttttgccctttctcattggatatgtcatatttttgtgatccccaaatatctgcgacagttctcagttaacttagaaagtttattttgacaaggttaaggacacacccatgatgcagcctcaggaagtcctgagacatgtgcccaagagggtcgagggtacagtttgcttttatacattttagggagacatgatacgtcaatctatatgcataaaatgtatgttggttcagtctggtaaggtgggacaactgaagaaggggcttccaggttagaagtagataagagacaaaaggttgcattcttttgagtccatgatcagccttccttctgaatacacaatatagtctggctcagtgaatctgcatttttacgtaaacagtaggagagaggagacaatcagatatgcatttgtctcaggtgagcctcagagggatgactttgaatagaatgggaggcaggtttgccctaaggagttctcagcttgactttccccttagcttagtggttttggggtcccaagaattattttccttttacagcttaaaggctgccatcaaatttgagtgagtttatgattttttgccccatgttcaactagggactggtagttttgaggatatctctctgatatatcctgataatgcagtcccttgaccatgcacacaaatttccagactgctagtgaccttatcattaagtctagcttcatcacagttacctctgggtcagtgtcatctattgttcagtcagtgtttaataagaggttgtggccatgagacttccaccctttgttgatgggtctgtgtaggttttggggaatgctttccagtttactctgtatcttactctgactgatcctgagtagatggaccctagggtataatatgcatagccctcctgaggcccagagttgactaatctttgagggctattgttggctggaactttccctggatctccgtattgaacttctgttgctgtagcattttactcagaaagctaccagtctcttcttaaatgctttcaaccaagatctgtcttgtttttgatatcactgttagacataagtttctccataatctttccaaataaagtcagtgccttcagatttagctgtggaactttgtcttttatgaattgccttgttctttgagaagtcttgtaccacttcagaactgggagtgtctgctttccctgtagtgatgaccttactttttaattgggtactattgggtgactgggttccattctggcatagaacctcagccctacacatgatatggacaggagacagggaaacactgggtagaagagggtggttccttggcaagcctggacctgtggccctaagtgggaacaggcatttctgttttcacacttaaaaagttgcctttttccatgaaccctatcctgtacccatataaaccccaaaacacaggctccagaagcagatgagcagacaaggagacgagaaaaacagatgaatggcgaatgacgcagcagataaagaggaggggaaacgtctgaactcagagaggagtttggctgggggcagttggagaggagtttggcagctggatggccaggctccagaggggagatcatcttcctgttacaggactctagcacttacctaaaggtagccgtcgggtcagggcttttgcactatagtcccttctgcggtcaccagaaatatgttacaggaaaggtgtcctgatttagacccctagagagggttcttggatcttgtgcaagaaagaattcagggcaagtccacagtgcaaagtgaaagcaagtttattaagaaagtaaaggaacaaaagaatggctattccatagacagatcagccccagggctgctggttgcccatttttatggttatttcttggtgatatgctaaacaaggggtagatattcatgcctcccctctttagaccatgtaaggtaacttcctgacattgccatggtatttgtaaactgtcatggagctggtgggagtgtagtagtgaggagaccagaggtcactctcgtggccatcttggttttggtagattttggcctgctccttaactgcaaactgttttatcagcaaggtctttatgacctgtgttttgtgctgacctcctatctcatcctgtgacttagaatgccttaaccgtccaggaatgcacccagtaggtttcagccttattttacccagctcctatttaagatggagttgctctgggtcacgtgcatttaacattcccactccatcccccattctggcttcccatccatccttctgagagccacctccaccactcaataaaacctctgcattcatccttcgagtccctgtgtgactggattcttctgggacactcgacaagagcttgagatacagaaagctgtcacactggccctctgcctttgcagaaaggcaaagagtctgctgagatggttaacacttaagctgtttgaaaagcagggctaagggcacactggaacacacacccacttgggcccctgcacctgtccgtctgcatgctctccctcccctcagaggtttgggcagtggtggcaactgacctaacaggcaagccacacccatgtcccatgtcctgggagggggatcaaggaactctcctgtttcacaagcaagcaggggcagggacaaacaggatcccagtattctttgcctgttgtcctttgtcctcttgctgtacctgcctggaatggagcttcggcagcatggggatgggagttgaaaaatgtcagtgacagtcatgtcctctcagagtgaaaccatagccctagactggaatctaggagagggggtaaaggaatctcttgttttcttggctgtatcttgctagagtagaacatccaggctacagtttccataacacctacccatggtttagggagaagtgagtggctcatgtctcgaatgacacagattctcattgttcttactgagatttagtagattttcttgaattgttgtttctcatttgttgtatgaccttggaaaaatttccacagagtttcaattattggattttttttccttttaaataatttttaccagttgaattgtgactttttttttctgagaaaatggtctgtcatttaatgcataggtttctaggttaatttcctcaccatcttttgccccttacactcatgaacctccatgccttatctcaactttattatttgacttgacactaaatttctttcctctttttcctccctttttaaatgtttcagattcttttgaatgctgcgtcaatagtttggtgaagagtattaaattatatattaattacatattttatttaggctccttcagcaaagaacaaagatacgttcagaatatctcaggtgttgggaatttgttgctttgaatcagaacctccattattgtcaggagaagtcttatgcataaaatcactattaaatatattcttgccaggaaaaaatatctttatattcattttcatcatatcaactgatatccaagacttggaatgcacagataatgctgtaatattagactgctgtatgcaaaagctctagggacagaatttcattttttatttgaagagagaaattcttagctacctttcagaaattatgtttacatcaaataaattttatacttgtctagtgatagcaatttgaataatggatgtcctctctgttgttcagtttcaaattggtttctcatgcagtcctaagattttagagctgtttgctcatttatgttttctgaaaccaaaagtattttgatctcatttttcacactgatattttccaacacagagaacaatgttccagttatgtaggaactccagcatcctaatctggcaaagtgcacacttttcccatgccttaaaacaaaacaaaatagaaaaacacacaaaaatctccataagataatgttctccaacgagaacattaaaaacattaaaaatctgtcatctttctttaaggctacttatcatctttattgaaaagtgtccatgtgaaaataaactatatcacatgtgatacccaggagtgtaagtgcccataagtgatgaacaatcttttaacttcagctagtttacagaaaaatgttttaattctactggtggctgcaaagctacatcataacaaaattttattggatgtgatatagttgatttgagccggttttacagatctacgaaacaggacaagggtagtctatttctggatgtatgtgaatgcaattctactctaatattttctatccagaaataaaaatatggtaataagataccatgatagcaagtaaaaatagtatacagtaactgtattaatactttcatcactatataagacaaaattagataattaccaagaaagatgggagagtattttaacactatttgtgtaaattcagtttttgaatttcattgaaaactgtctttattgttggagtaatgctagaaacatcaattttatgggctgcttatattacaaagcagttttttaaggctataataatatttatagtatattgatataataaagaggtgtgacattttttattctatcaaggaaggactcaatttctggaaacctcactgaagtgatgttcacccctctctccttgcctgattcccacccaacatttctgacaccaggttgaaagcttgactttaatatctgaatttctttttccttgccatttatcattttaactctaggttcttgactctgtattattttctaaatgaatttatatttctgtaaatggtcagaaggaacaggaatcattgttttctaagaagttttatttgaacgaagaaaagggagcaacaatatacctttatttttttctcttaatggtttgcatttaaaagtgccattttgatggataagagcttccagggaagactattaaatgcattattaggtagatcgagaacaaaaaagtctacatgtgccattgcgttaatgccattcttgctaatgtttatccttgttttacattatcacattgatttttcttcccaattagagggataatatgcacttcattgagattctagagaactgtatgtccctgatctttaggcctcagtttcctcaacattaagtgaggacacttaatgtttaactgaattaaacagattgaaatctccctttagtggagtgcttctaggatgaaaacagtaattatatatcactgagtgaaatattatacccaaattagcttataactatagcttatagcttgtaataataatacttatttttttcagcgtttttgttagtccagtatttgaaagaagcttatgtgagcagatatggctgtatcttatcagattatagtcaagatgttgaccagaactgtagttgctgaaaattttaactgggactggagtgccttgtttaactcagtgagtcaagtgctagttcaaatacaatcccatgaaaatttctgttccctggggactagctgagtttgctctgttatatgataccaaataatcctctagcctcagccaggtgagtaggcaatgaacaaataggtcaaaaatggcacttgtcgtagaactttaatagactggaaaaacccattggctctacacgctctacctgttgaaaccaccaccactgtcaagaaacaccaacagtaggtaatctcactgcggttagatatggtaacatttacttttaaaagttatagcccagtctatagctaatgaatatgatatgacccattacaccataatgctaggcttctaatgggcacttaagtagctgatgatcattagattgctgggctgagaatgatgaaccaactgataagtatttcacttcattgcacaattttctttacccacttaaaacctctaaatagtttagggttaagaataatatttttagagagcattactgaccttgtgtggaagcatatttttactatgttttctctgagaagggatctctttactgatttcacagttcagacatttatttaagtcatcatgaaagctgtttgttcctgctaatatcaaacttttatgcctaatagagacatagcatcgcaggaaatattttagaatttgttcatatttcagcataactaaatgttgaaactttaatatttttatcatctctaagacaattgctgctaatggtgaaagtaaagaatgcatttttttatgtagatctcatttttatttcagccttatataaaggaaaactaatttcatagttggaattcattaatcactatactttattactaagtttctgtaagtgttcacactgtgatctatctttaccaattgtaattagttttcattcactaacagagtgagcaatttacctgtataaccattcattcattcaagaatcatataatctgcatttttttaggtttcaaaattagaaaagccacacccacctacattatgaaagaagatattttattaaaatattgaaagttcagaggtaggacatacttcaggtttgttttataccggtagctcagggctgtcactgatgtatttgatggtattttctctttccttttccctgtcttccctggaattagcagtatcttcaactcttcttgagattacaaagatggctgcttcagcttcaggagctgagttcaagttcaataaagtgtctcatttctcaaacatcaaacagacctgctgatttacaagttgattgaattaatttagattatttgcctctcaccacaaatatgtcactgttggccctggaatgtggtgcacaagttggttggctttatactggccaatttctttaagggaagatgttttcactgctgattgattttgtttagtaattaagggattattcaaattttttactctgtagtgaatttattttgttaagttatgtttttctaagaacttattcaggggccaggcgcggtggtggctcacgcctttaatcctagcactttgggaggccgaggcaggtggatcacgaggtcaggagacggagaccatcctggccaacacggtgaaatcccatctctactaaaaatacaaaaaaattagccaggcgtggtggcgggcacctgtagtcccagctaatcaggaggctgttagccaggtgtggtggtgggtgcctgtagtcccagctactcgggaggctgaggcagaagaatggtgtgaaccggggaggtggagcttgcagtgagccgagattgtgccactgcgctccagcctgggcgacagagtaagactctgtctcaaaaaaaaaaaaaacaaaaaacaacttattcacttaatttacattttccaaagttgtttttactctcattactttttaaaaatttttaatttttttgaattatattttaagttctgggatacatgtgctgaatgtgcaggtttgttagataggtatacgtgtgccatggtggtttgctgcatcctctcctcactacttttaatgtctgcatcattggttgtgatgttccctttttcattctattacttatttgtttcatttctcctttattttcttcgtcagtctcaaaaaaggtttatctttttttattagtcttttccccgaactaaatttgttgattaactttattgctgttactttgctgattatttcctattcttgatcattctctttctgatatgtattattagttttctagtgttgctgtaataagttactacaaatttagtagcttaaagtaacacaaatttattatcttacagtctgaaggttagaagaccaatacaggtcccactaggccaaaagcaaggtgtcagcagggctttgatccttttggaagttctaaggaaaaatctgtttccctcccctttccagcttctcgaagatctgtggcatccttactttattgtcagaatcagcaatggcaggtcaaatcctcacattgcatgttggtgatttcagtttctgcctcccccttccactggtaaagaaaccttgtgattacattcaacctgctcagacaatcccacataatttccctattttaagatcagcttgttagcatcttaactccatcttcaatcgtcattctctattgccatgtaaattaatgcattcgcagattctggtgattaagatggatttctttggggagccataattctgcctgccacctacttatttggtcttatttttttcttttactatctgtttgagataaaggtttaactcattagctttcagtgcttcacagaatctgaaaatgccatcaagtttataatctttccttaagtactacatgagctgcatcctcttttatttagaatacattataattcagaccaaatttttctttttttcctctaactcatggattacatagacatgtatttcttgatttataaatatggggcattttgctagtttcctttttgtaattgctattaattcatagtgataagaaaacatggtaatgcagtcattggaaagtgttccaagttgctagaaaatactggatattttgaacttattttgtgtggtgtttatgtacgtccattgtggaaagctatttaatcatgttgttaaaatattttgaatattttgttgttctaccaattactgaaaaagttgtcttttaaaaacattttattatacatgggtatttgtctattttagtatctgttatttttttacttcattttttgaagttatattattcagtgcataccagtttaaaattgttatgtcttcatgaatatttatttttatgaaatgatactgtttatctccatcaatagagaatttttttccagtagacttaccttgactagtcccaatgtaatcaaaagggtccttaaaagtggaagaaggagtcagagtaatgtgatgtgaggattttgggtagctattaggttggtgcaaaagtcattgtggttttcgccattaaaagtaataggaaaaatcgcaattacacttttgcaccaacctagtaatatgctttaaattgccttaaatactgctttttctatcattagtataacagcaccagctttgtttttagttgaatttgactgcatataaattttcctcctcgcctttttaaacttcacgtatccttacatttctgctgtattgcctgtaaatagcttactgccgttacccagtctgaacatctttgcattttctttctttttgatcagatttctgtattatcagctcattctatataaaacatagaactataatataggaacacaatgtctctcactaaaaggcagggagattttagggtgcaaacaagacggtgaaggtataaagttcagaataatattttacgtgattctctgcagctcacaagactaggcttttgcagaaatctgattcttagaggagggtgtcgctcttttctacttcaacctctcttctcaattcaggctactcttggctttttcagtttctctcttcaaggctctcaaatcagtagccgcagtctttttttttttttttttttagaaaatacttctttattttccaaaaacttggagcattacaagtttttaagtgttccttggatattcatggaagaggattcctaggagcatgaaaaaatcatagtgctgagtccactcttctgaggctaattgtgaatgatccaactccaattctatctttcttgtctgttattaaataaattaccccttccaataaaataaccattaattattttctcctaggccagacagtaaaatctcaaattaagaaaaataattccctttttactttggctgaatttactgactctagcatataataaacatttttgttactaacgtgcgtttgtttcttttctcccaactgagcacacttgaagtgaaaaccacccaacaaacaagaggctaagcaaactacagtaaaccaaaacatggataagcagagactgattagaaaaaagaaaaaataaataaaccaaacaagctctctctttcttacctgcatatcaacttatttcattatgggtaatgctgtcttttaaaatggcatcttccaggtgactccactgtaaaattactgttttttctttgtaattgagagtaagtttatgggaaaatacctaaggactatttaaatgtcctgctttttcttgaacttttgcccgtttttagcatctattgatatataaatattactgtgatatttgccaaagggtgtttttctgttctcataatttcttttatatttaattggtctattatgtatcaaagagctatccgctccgtttacttattctactatttatttatattagtatggcctaattgatatttcttttactcaatgcattacaatccattactataattatttaactttttatttagttttcccatgtttggggagttggaatactttatgatggcatataatgcacagcctattcatcagcagcaatgaagaggagagagagtagaatggaggtggaatatacaaaagatcattgtacaaaagcagtgagagccaaaaagaaagggtactttactgggacctttctgtgcatgaaaattagctgtgtatagagtttgcataatagaaaagaacttgatcaggggaagaaatggaggtaaggaagatagaggtaagagaaagttacacaaaaacagtattgttgctgcactaaaagtccagacttcaccactatacaatttatccatgtaacccgaaactacttgtatccctaaagctattgaaataaaaacaaataaaaatacagcagcaataaataagacagtgttgtggaatgtttcccaaataattccttcagaaattgtgtgacgtaaattaattgtgggggaaaagatatacagatgatgttcagaatcatatatttttaatattctatctgattcttaagcaaaaatgtaattctttttaattaatatcttgctagtgaaattttaatttctgtacacatattcttaaaccaccaattgaccaatacaggaagaattcttgcagaaataaaggccaatatactaaaatgatcacaaataagtctatactcatttcaaaactaggttatatgaattaatccatgttcactattatttcattattagccccattgtgattttaatttatcttaaaaatttaaattgttagtctatgatgaagatggtgaatgtggttatgggtgaatatcaatccagttcgaatttcccacctccacataaccttaaagcaataaattgtggaagtacacgaagacaatcagggtttagaagttagtaactttttaagtttattatctgtcaattactcaaaacctgtctctcaaactacaaaataagcttacaaataagttgtatatcacatatagtgtataaaattatctgtcagagtatttaaaaaaaatttcaaggcatttacccacttttaccaagtctttctccaagtccctactaacatttttttttgttttttgttttttttttttttgagatggagtctcgctctgttgtccaggctggagtgcagtggcgcaatctcggctcactgcaagctccgcctcccgggttcacgccattctcctgcctcagcctcccgagtagctgggactacaggtgcccgccaccacgcccggctaactttttgtattttttttttagtagagacggggtttcaccattcacaggatggtctcgatctcctgaccttgtgatccgcccgcctcggcctcccaaagtgctgggattacaggtgtgagccacggcgccggccgtccctactaacattgagctaaaaatagtccctgttactgatgggatgtggcttatccttcagctgaattgaggctgaaaaatattaagaccaataggtctaatactttctgattttgtttattgattaatctagtaaaatttccaacaatactaaatgcttctgcttttatctactttgttaaaaaaatgccctctctattttccaaaatttttattcttttatccccaatgcacagatttatttttataggtgttaaaagaagtttactttttaagatcaaataacatacacctctcttcaaatagatgttcaccaattattgattctacagaagagtttacttttgtattaatgatttagcttcacttaaaaaacaacactaatagtcattagtatatttggatctttctgcatgtctatttaacatgcagaaggaattaatagaaacaatgataaattatgaaagcctatcttgataatcatacctcaaaattttatgagtatagccaaggctgtgcaaataactctgaacttagtatcaagacattagggtatcagtttaatttttactacactagagttgtgtagtccaacatgtatcttaaagtacttagacttcagttttctcatctctgtactgaatggggttggattagataatctctaatatccttttaatctccagagaaatattatatatatgtattttaaaatattactgtaacaattttctctttctttctctcttctctctttcttctctctttctttctccctccctccctgcctccctccctcccttccttccttccttcctttccttctttctttctttttgagacggagtcttgctctgttgcccgggctgaagtgcagtagcctgatctcggctcactgcaacctctgcctctggggttcaagcgattctcctgcctcagcttcctgagtagctgggattacaggcgtgcaccaccatgcccagctaatgtttgtacttgtagtagagatggggtttctccatgttggtgaggctagccttgaactcctgacctcatgatctgcccgccttggcctcccaaagtgctgggattacagacttttctaaatatgatatacaatttgtaatttctcttaatggttaaggcttagctaagtttcaaagcttccaaatggatttatttttagaaacacttatgtgatgcatcaaataaagcatatatgacaacctagaaaagagttagaagtttactgggattattttcttggcactgccacaataatactttacagaaagttactctagttccacttccttcttgattctacaagaagggatacataatgctatcacattaagtccttaatgcaatttcagaaatcattagcatgtatttctgaagaaagctgtgttttctttgacgattgtatttaaaaactaaagacaagtagttattcaaagtaaattttacagaaaatattaattataattgaacaagtaaatgacaagtaaatgacaaatatgaaggtcgagtggatacaaaaattcaaatggattccatttcctttcaaacttgctctttaaattgtgttactgcaaagatataccagggaagatgtgacaggataatccttgatttcatttatatatttaataatacattgtttccatgttatataatttttggcagtgagatcattttttatttttattttttaaattaaaaaaagtttatttccataggttttaagggaacaggtggtatttgattacatgagtaagttctttagcggtgatctgtgagattttggtgcacccatttcccgagcaggatgcaggatgcaaaggcataagaatgactcagtggactttggggactcagagggaaagggtgggaaggggtgaggaataaaagactacaaattggttcagtgtatatattctatacatcttgtgttttgttaacccagtgtctctcaaactagtcaaaaatcaggagatggacccaaaagattctgtttgcattagtgagatgtcaggaagaggaaagtaaaatatctaagtacctactctctgcctacttactatgttagatgctttatgaattattgccccgtttgctagtcttaaggtattattttgttatcatgtctattttaagagtgagcaagatgaggtcaagaaagcttaatacaattgttcaggctttagctagtggaatttaatttaaaactaagaacaactagattcagatttattcatatttaggtttgtggaaagaaactgagagaaagaataattctaatgctaagtattctctaaaaaactaagaacagaagactaaccttgcaagttataaattctgattaagtgattatgtagcctacacaagtagtgatgtgaacatttccttcttcctacaatgacataaaactgttgaataaaaacctagatggaatttccaggagttacctatttctcctgcccatgcctctcaatgacaggcaactgtagcctgttctttgcccttgtctttgtttttacatctccatgctggagttcattatgaagaaaacatggtgaagaatgagaatccaaaagatatcacaagttaattcaaatgatggaagtatttttaacttttcactgaacatgtatacatgttaaataaagggacctgagctcttcaaggcaaagcaacatgtttttcagagatgactgcttatcagtacatttaatttgagacagtttttaccctgagtcaagtatttcccactatggtgacctctacactgttgacattttgtagtgtggaactgtttatgcattgtaagatgtctagcagcacccctaaccctctactctccagatgccagtagcgcccttacagttgtgacaatcaagagtatcttcagagatcatcaaatgtaccctgcgggacaaattcctgcccttggagaaccactgcactgcagggatatttaaatatatcacaactggagtaaattttacaaaatttatcaatcaagatgtttgattaattttgtattgggagaagttttgaaaatggcttgccttttaaggtgctgttcatagctaagaataaaaataaacataaatataaaaatatacgttcccataattgaaatatcattttcatatgatattatcatctatgacatatattctacatccctctttttcttctattaatattagccctttaagtggcagtgttgttcatggtaacaatgctagacttttacacttatatgtattctactatatatattatatatatatataaatgatatacctatatctgaaattcagcataattatttaatttctcagtgtttcaatgttcttatctgcataattctgaattataggtgcttgattacattatggtatagattaattgagagcatatataaaaacacaatgtgttgcctaatattttgtattaagtgccagatacgttttacttaagttgaacactttgatagtcctgttcttttctggacagatagtctatctgccacctactgtttccacataagttgcgtctaactctccacagaagattttttttcttctgttcctctgtctctaggaggaggaatgagcttgctgtcttcttccttgtgttagtttcaaatcatgtttttttcccttcacccaaaattttcagcttcacatttctttcatccattctttagcatattttaaattattactttagaggctttgtctgataattctaaatactaggtcatctacagggcatcatttgttgactatgctttttcttaattatgactcttttctgctttggttgactcatactttttttattatattacagatatttataataaaattacagtggagacaaaattataataatatttggttttatctcttttcaacaatgtgcagggcttgtcttttatctggcatttgtaacgggctaattattcagatttctcttgttgctaagttgaaccacggcttagtcacaatttaattagattaactgtctttagccctatcaccaaccatcaatattttagctaccatgttattcttgttacatttaagctagaggaagtcggctgcaatttcaagtattttatggtttatctctgagctcagcttcagcagtggcctagcatccaatgtctacgagaatgtgcaaaaccgtactaattctctctagagaacacctcctagagagctgaagaatttggggatagacagggctggaatgaatggtgtgctcctccatttaggcctcaactttatctagcttgtaaatgaagtcagggaaaatgtagaccatgtctgagggtcctttttctttacctgtctgaaaacactgccccataaaatgccactcaccttttagtttttttattattattttttgctttttgcttctgttctatcaagtcatgagctataaaaacatacttaatagtccattcaattggtgtaaatgttcaacataaattggcacacatttttttcacctttaaagactaaaaagtaaggctatttttaatttatttatatttgattctgtggaatctgacatccaaagcaaagataagctagatatgagtaaaacacataccagtttattttattttattttattttattttttattattattatactttaagttttagggtacatgtgcacaatgtgtagttttaatgctgttttcccctactgtttcctagacccaatggggaaaaagaaaaagttctcaaacttaagcaggttatttctgctagcaggttacactgcccacaatgtcgatggcattgggtggcaaagtacttgaaagtctgcttgtctccaaggaacatgaagtctaaatctttatgcatccaaggaaagtcagtcagtcagtggattttggcagattaaacagtatcagattttttttatcctattattccaggttaatactgaaaaaggcctcagagccttctcatttatgactcccatttatgactcagccaggttttcattgtctacaccaactgaataaaattaatccagtgatttttttcaaataatatcactgaagctaattataatttaaatatagcatttttctctaaattcaaactatcctaccacataaaagttttatgatcttgcttataatttatggtcaagaggtataaacaaatcttgaaatgatttggtggctaaagaaagtactgccatatgctaacttctactttaaagtctagactctagaaatgggtttttatcgagatccctcctcatcatttcagaattctagtttatttgcgtagaggtgtttgtagtattctctgatggtagtttgtatttctgtgggatcggtggtaatatcccctttatcattttttattgcgtctatttgattcttctctcttttcttctttattagtcttgctagtggtctatcaattttgttgatcctttcaaaaaaccagctcctggattcattaattttttgaagggttttttgtgtctcttatttccttcagttctgctctgattttagttatttcttgccttctgctagcttttgaatgtgtttgctcttgcttttctagttcttttaattgtgatgttagggtgtcaattttggatctttcctgctttctcttgtggttatttagtgctataaatttccctctacacactgctttgaatgtgtcccagagattctggtatgttgtgtctttgttctcattggtttcaaagaacatctttatttctgccttcatttcgttatgtacccagtagtcattcaggagtaggttgttcaggtttcgcgtagttgaacggttttgagtgagtttcttaatcctgagttctagtttgattgcactgtggtctgagagacagtttgttataatttatgatttttacatttgctgaggagagctttacttccaattatgtggtcagttttggaataggtgtggtgtggtgctgagaagaatgtatattctgttgatttggggtggagagttctgtagatgtctattaggtccgcttggtgcagagttgagttcaattcctgggtgtccttgttaactttccgtctcgttgatctgtctaatgttgacagtggggtgttaaagtctcccattattattgtgtgggagtctaagtctctttgtaggtcactcaggacttgctttatgaatctgggtgctcctgtattgggtacatatatatttaggatagttagctcttcttgttgaattgatccctttaccattatgtaatggccttctttgtctcttttgatcagaattctaaaagaatgtcaacattagctgggaatggtggctcacacctcccagcacattgggaggccaagttaggtggatcacctgaggtcaggagtttgtgaccagcctgaccaacatggtgaaaccctgtctctactaaaaatacaaaaattagctaggcgtggtggcaggcacctgtaatctcagctacttgggaggctgaggcaggagaatctcttgaacctgggaggcagaggttgcagtgagctgagaccgcaccactgcactccagcctgggtaacagagccaagactccgtctcaaaaaaaaaagaatgtcaacatcattgtcccacctatctttatctgcatgtttcctgccacaatgttgggatatttgggttagagtttctttgtgtgggaaaacatgtgttgacagttattgatttatcagtcaatatgactgatgcttacagaatatcacctttttcatgtcaggctctgtgcctggaacacagttacaaagaaacacctcacataatccctgtcttttagtaaaaatacaaaagtactgctgcttattcttaagttaacatacgtggcatgtgtgcatttgtgtctatgcccaaagtatgaccttacatctcacttgaaaacaaacgcaaaagctaagctcatagcaaaaaagctcaattaccaaattcatgaagtgaacttctgttttcacttaattttgctttttagtttactgaatgtgtttttattcaaacatacatatttgattttctggtggtcttttttttaaagcaaactttttatattgagataattgtagaatcaactacaattataaggaataatacagaaagataatatatatctttactcatttttcaaaatcttgcaaaactagagtaaaatagcaaaaccaggtagctgactttgatacaatgaaaatgcagaccatttccatcaacagcaggatcgctcatgtggcccttttataatcacatccatttcccactcactcactccctctttaacccctggcaaccaatgatctgttctccatttttataattttgtcacaagaatattatgtagatgaaataatacagtattttatattttgatactgcatttttttcaatcagcaaaatcctctggagattcatccaggttgctgcgtgtatcaatatttaattcctctatattgatgagtagtattttttggtataggtgtataatggttaatattttagatataaatgtatgccaactgtgttaaagcatatttagatagctggtaaaaacaaacaaacaaaaaaaatctattatttctgtgtaggtctgtaagggtgcttctgaaaaacactagcatttgaatcagtagactgaataaagatcacgctcaccaatccattgatggccaaattaaaaaaaaaaggcagaatgagggtgaatttgctttcttttctggaaaggagacaaccgtcttattctgccctctgacatcacagctcctggtttttgggtcttcagactttgggacttatactagtggctcctcacaggttcttgggccttcagactcataccgagttacaccactgtcttccctgtttctctagcttgcagacagaaaaccatgggacttcttcacctccataattacataagtcaattctcataataaatctccttttctctctgtctctcccagaaacatatatgtatgtataaaacactcccttgaagccgtagagtacaatcaaacatcttggctcctcctgaaacctgctcccacccatttcagtcccgataacttaaagatcttaagtagtttagacacacacctttgctcaaggaaattcacagaaactgccactgctatacatcttatttaataactcacgattctccttcgctgattaatccttttcctcatcccttcctacccctcccatctgccctaagaacaaagagcttgtaaaccaataaattaggtggggccaaagagctctgggcggtgagcaagcctccgacgctccggtcccctggacccgccttttaaacacgtattctatctctttctaattcctttgtctccgctggacttggggtacccgctgggtggtgtggggctggtttccccaagacacacatatacacatatgtatatgtacgtgtatatgtgtgtgtgtatctatatatattataagtatatataatatattttgttgattataaattacccagtctaaggtgttttgttatagcagcccagactgactaaaacaactatttattcattgaagaacattgtgattgtttcccagttttgacttttatagacaaagttactaaaaacattcatgtccagattcttgtgtgaatatgtctttaatcattgataaatgtccaatagtgcatttgtttggttttatggtagttgcacattactaatgacactgttgctgaacattttctcatgtgcttatttgccctatgtgtatcttcttcagtgaaatatcccttcctgcgcttcgctaattttctttcttcttttttttttttattatactttacgttataggatacatgtgcagaacgtgcaggtttgttacataggtatacacgtgccatggtggtttgctgcacccatcaacccatcatctacattaggtatttctcctaatgctatccctcccctagtcccccactccctgacaggccatgatgtgtgatattcccctccctgtgtccgtgtgttctcattgttcaactaataaatggtgtggggaaagctggccagccacatgcagaaaactgaaactggaccctttccttacaccttatacaaaattaactcaagatggattaaagacttaaacataaaacccaaaaccataaaaaccctagaagaaaacctagtcagtgccgttcaggacataggcatgggcaaaaacttcatgacaaaacaccaaaagcaatggcaacaaaagccgaaactgacaaatgggatgtaattaaactaaagaggttgtgcacagcaaaagaaaatatcatcagagtgaacagacaacctacagaatgggagaagagtttttgcaatctattcatctgacaaaaggctaataactagaatctataaggaacttaaacaaatttataagaaaaaagaaacaaccccttcaaaaagtgggcgaaggatatgacagactcttttcaaaagaagatgtttatgcagtcaacaaacatgaaaaaaagctcattatcactggtcattacagaaatgcaaatcaaaaccacaatcagataccatctcacaccagttagaatggcgattattaaaaaaatcaggaaacaacagatgctggagaggatgtggagaaagaggaatgcttttacactgttgggagtgtaaattagttcaatcattgtggaaaacagtgtggcgattcctcaaggatctagaaccagaaataccatttgactcggcaatcccattactgggtatatacccaaaggattataaatcattctactataaagacacattcacacatatgtttattgcagcactattcaaaatagttttctccattttctaattgaatttggttttgtttttattgttacattttgagtggtctttatatatcttagatactagtgctttgttggatatattatttcccaggaagtaactttgcttttcgttaactgtatcagggtatttcacagagcataagttttgtcttgctgtttgatgaagaccaatgtattaaaatttccttttatggattatcatctggtgtcaagtctaagatacatttgcccagccctagaacacaataatttctgttttttctaaaagttgtatgtttaactgataaatttacctgtgatccatatttaattaacatttgtataaagtgtgaggacgagccattgctgtttccttttttccttgtagatgtctaattttctacctttttttcaaaaattaggcgcatttttgtggccttctttattgattctctcttctgttttattgatttgtgtgtcccttcattaatacaacaaagtcttggttactctagctacataatgagttcttaaataagttagactgattattctcatattattcgtttttcaaagtttatttttgctattctagttctttggcttttccatataagcgttattattatcaatatctacaaaatatcttgttttgattttgataaacattacatcattacattagtctttagaatattgagtcattaaatttaagaacattatacagaaggtccttgaataacatgtctttgaacattgtttcattataatattgatgagaaaaaaattcaattctcagccagggctattgtctgcgtggagtttgtacgttctccttaagtctgggtattctggttatatctcacatttcaaagatgtgcacgttaaaatgcaatgtctaaattgtccagttggagagagagagagagagagagagagagagagtgtgtgtgtgtgtgtgtgtgtgtgtgtgtgtgtgcatcctgtgaccagatagtgtcctgtccagggttggttcctaccttatgcccaatatagctgctagtataggcttcagggacctgtggccctgacctggaacaattgaataataaatattttttgacttgtttttgttaatctttcttaaacatttgtataactcaatttattttaatgtttaatgtcagaggtgttttggtctttatttaaaaacttggtgatgtttcctgtgacctgaaatgtgccacaggaacttgttttgtttgtatcagttagcctatgggaaaattggttttattatatgttggttcatttaaagtcactgttttcaagaacctatagacagcatttatgaggacatactgtatgcatctctgtttatttagatctttatttacttttgtcaaggttgtgtagatttcagcattcagttactacatatattttgtttgatttacatcttagtatttaattttttgagcaacataagtagcaatgtattattaattttgttgctcatatgttcatcaataacatatagatatataaaggatatttgtatatttacatgtatcatgccattttgctaacctaacattttagttctagggttttaaaaatgtatgtgttttgtaaatatcttgggggttttctaagtagataattttgtcatctgcaaaaagggagagattcatttcttcctaactgatctgtaagatttttatttttttttgtttatatacactagttataaattctagcactgtgctgggtaacagtgtttggagaagacaaacttactttggctcggatcttattgggaaagcattcagtcttagatagttaagaatgatataatctatataattttttagtctttttgttggttcactcattgtagatgatctttatcaagttcaggaagtcctccttagtattgtatttctaagagttttcatcatgagtcgatgttgagttttctcaaatggcatttctgtgtagattggtgtaattatttttttcttgttagcttgttaatatgtagattgcattaattttgtaaaatgtttaccagctttgtattcctgtaaaaaacccactttgttaggatatataattctttctatatgttgctaaatcctatttgttaatattctttaaggatgtttgcatatccattcctgagatattggtctgcagctatctttcttttttaaaaaatcattttaagttcaatggtacatgtgtaggtttgttacataggtaaacttttatcatggggatttattgtacagattatttcattacccaggtattaagcctagcacccattagatatttcttctgattctcttcctcttcccatgctccactctccggcaggctccagtgtgtgttgttatcctgtgtgtccatgtgttctcattatttagttcccacttataagtgagaacatgcaatatttggttttctgttcctctgtttggtaaagataatggcctccagcttcatgtccctgcaaaggaaataatcttgttctttttgtatggctgcatagtattccgttgtatatatgtaccacattttatttatccagtctttcactgatgggcatttaggatgattccatgtctctgctattgtgaatggcgctgcatgtgtctttgtaatagaacaatttatattgctttggatatatacccagtaatgggattgttgggttgaatggtatttttgtctttaggtttttgaggaattgccacactgtcttccacaatggttgaactaatttacactccttctaacagtgtatagatgttcctttttctccacaaccctgccagcatttgttattttttgacttgtattaatagccattctgactggtgtgacatggtatctcattgtggttttcattagcatttctctaacgatcagtgatgttgagcattttttcatatgattgttggctgcatgtatcccttcttttgaaaagtgtctgttcatgtccttagcccactttttaatgggcttgtttttatcttgtaaatttaagtttcttatagatgttggatattagaccttggttagatgcatagtttgtaaaaattttctcccattctctatgttgtctgtttactctgttgatagtttcttttgctgtgcagaacttctttaattagatctcatttgtcaactttagcattttttgcatttgcttttggtttctttgccatgaaacttttgactgtgcctattgcctatgttgtcttctagggcttttacagttttgggttttatatttaagtctttagtccatcttagttattgtatatggggtaaggaaagggtccagtttcaatcttctgcatatggttagccagttatcccagtaccatttttttaaataatgtggtatatttttatttcctaagtacagaaatataagtatataaacagcacccagtgcaccaaaacacatttacagccattcaacaaactgtgtacaagcatttgaacaaatatcataccagcatagcatgtttgttctaaaacatgccacttatgttagaattttaaaaataagaattatcacatttgggtgcccgctatatcattcttaggcatttgcatcatcatagctttaactcccacttatcagtgagaacatatgatgtttggttttccacccttgagttacttcacttagaataatggcctccaactccatccaggttgctgcgaatgccattatgtatactatagacactttacttctctttacatttccttactcaccatatttataagtgtctttgatattcccctacatacattcagatccaaatcaggcattcttccagtgtttgctttaaccatcgaacataagttagacaattcaagaagagaactctgttgtatgaactcctatttttgctttctctgttctttattcctttctgaaacttttaatgttgagcatgattacatggctaaatgtacaataactccccaaaaaagagataggaactcttatgtaaacaagtaactatgtcagaagcaacctaataagaacaatctagaatgtgtcaattgtatttctatatacatgtagtactcgaaattcaggcttgagctcaaataatcaatagaaccctcatcaaagtagtttgcatttgaaattaaatcatgcttttataaattttgcatcattctatcattgatggagcataccctgttacaacattaaaattccagtataactgtcacatttcaagggggaaaaagttttaaagttatgtttagtgaaggggattaagtcagaactatcacatttccttttccaagcacaatgctcccaagagaacttgttaaactttatttcacaatgtaaagtatgcattttaaaacacaccatttcaatatacaatgagcacttttcattcacacacttctacctctggaaaaaatcttaaattatctattaattcagtgaagttgaaagatatttttctttttaatttagaaagcttaattaaatgccaatctcttaaattccttgaatctttagattttaatcacaaaaggcacaatttacttaggaaaaaaatacatcttgaaagcatcctacttagaaactacataggtagattccaaataaattaattcacagtaatttagccatatttattaagatatgtaaccacgtgagttaaaagtctatattataaaaacccattttaaagttgtttgtatatgcatactcagtagtgtatattgagaacatgatatcaataagtagaaaatcttgccctttaacacataaagataattatctttaattagcagcatatatattttgcttgcaatttttcttatttcaaatttattgaaacatgtcaagaatagtacagggagctctgatatacaatatttattcagattcactattagtttacacttttcctatttcctttatcattttttctttaaatatgcatataaattatgtatgagcatttgagagcaagttggagatatagtgcccctttatatcaaaatacttcaggtcacattttctatattacaacaatactgttactaaaatgtgaaaattttatatttatgcaatactatgtaatttatagcccttattcagatttttttaattgtcccaataatattttttagaactagtttttcctggccaggatctaatacagattcacgctttggattaatttatcatgtctctttagtctgtaaattgaaacatttctttagcctttgtttctcttcactttgacgtatttatttgatgagtttaggccagacattttgtaaaatgtctctcaatttgatcttatctgatgttttttcatggtcttatttaagtaatttgttactgtcagggatgctaacaaaagtgattgtatgttcttctgagtgtaccatatggaaagaaaatttatgttggtttgtcaaaattagtgatgtcagttttgatcatctcattcaagtagtgtctaccaggtttcttcaatgtcaagttggcattttcctttgtaattaataagtaatttatggggcaataatttgaaactgtaaatatcctgtttcttattaaacttttactaagtagctttaccgcacattgatacttttgtaagttcttcatctattttctatcattggtatttcactttaagaagaaatttcccttctccaattatttatcaatccatttatttatgtaagtatgggcttctgtgaattatcattttattaaattacttaaaatttgttactataattatttattttgaggctcaaattttcctggagcttaccagttggagtttcttcaagctggctgttttattcttttgattactttttgttgcaaggagatattacagtatcagcttaaacttttctttcttattttgctgggattagtatttttaatcattaatttatgtgtgtgtacataatagttgtgcatatttatggaataaatttgatgatttggtagaagcatacattatgtagtgaacaaatcggggtagttgggatatctattacctcaaacatttataatttttggtgttggaaaatttctaaatctacttctctaaatattttaaaatatacaataaattgttgctaactatacctaccttattgtgctacagatcactagatcttatttctactatctagctgtagtttttagagattaacaaattctactttatcctttcatcctcactatccttcccagcttctatcatcattctaaactctaccaccatgagatcaacttttaactttcacaaaattgtaagaacatgtgatatttgcctttctgtgcctgatttatttcacttaacataatgtcctccagttccatccatgttgttacagttccgtctttatttcatggccaaataacatttatttcatccagttccatccatattttatggccaagtaatatttcactctgcatatgtaccacattttctgttttcattcgtccattgatggacacctatgttgatttcatattttgagtattgtgaatagtgctgcagtaaacatgggagagcagatatctcttcagtacagatttccttttctttggatatataccaaacagtaggattgctggatcatactatttagtagttctatttagttttttaagaaacttgcatattgctttctgtagtggctgtgcttatttagatatgtatcaacagcatatgagagttccccttctctacatctttgttattttttcttttgtataaaagccatcttaactagggtgagataatagttcattgttttgatttacatttttctgatgattagtgatgttgagcagtttttcatatacctgttgaccatatgataaaggccacatatgacaaacccacagctaatatcatactgaaaagagaaaaacagaaaggctattctctaagattgggattaagacaagatctggaataagctgcctttcaatactgttacttcacatagtagtgaaagtcctagccagagcaattatggaagagaaagatataaggaacatatgaattgaatatgaagtaaaattgtcactgttttcagacaatatgatcttatatttagaaaaactgaagactctaccaaaaaactattagaattaataaatgaattcagtaaagtttcagatagaaaatcagcataaaaaagtcagtggtatttatatattccaacagcaggcactctgaaaaacaaagtaatcttattttcagtaactacaaataaaatgaaatatctaggaataaacttaaccaatgaagtgaaagatttctacaatgaaatctagggaacattgactaaagaaataaaggaggacacactaaaaatggaaagatatctcatgttcatggattggaagaatcaatattgttaaaatgttcagacattttaaaataatgtatatgaaatatttcacccaaagtgatctacagatttaaagtaatccctatcaaaataccaatggaattcttcagagaaatggaaaaattattctaaaatttatgtgggactaaaaaagacactgaatagctatagctgtcataaacaaaaagaacaaagctggaggcatcacattacccaacttcaaattatactacaaggatatagtaaccaaacagcatgatactggcataaaaataagatacatagatgagttaaacagaatagagaacccagatataaatctccacatttagagttaactcatctttgacaaagaagccaagaacatacactgggaaaaggatagttccttcaacaaatggtgctttgataaactggatatccatacaaagataaatgaaacaggattgctatccctcaccacatccaaaatggaatcaaaatggattaacaacttacatgtaaatctaaaactgtaaaactgttggaagaaaattttgaggaaatgcttcaggatattggtctgggcaaagacttcttgtgaaagaactcaaaagcacaggcaaccaaagcacatgtcgacaaataggattacatgcagctgaaaagcttctccactttaaagggagcaatcaacaaagtgaagagatgccccacagaatgaagaaaatatttgcaactattcaagtgacaagaaattaataagcagaatatttaagtaactcaaataataacaaataaaccaataatccaatttaaaaatgaaaagaaatctgaatatatacctgaaatatctgaagacaaactttattttcctatctatcccttatataaatttttaagacttacttaaaaacattttggtgcaacgagacattccaggatggaattataatggagccttggtttcttttaacggagaatggtgtttagaaaacaaaatttggatgttaggagcactcattgttccttgtgtttcaatgtttctaggtcttctaagcaaacaaagctagaatcagttacaaatgtattataaaaatatttctatgctacaggctataatttaatttcctcgcttaagttttttttaattccccttttccagtgagctctcattagcctcaatcttttaaactgaagtctagaatactgtactcaatacttggaaattacttacagaattgctagcacacaccactgtgaaaagtgaagtatgtaaattcaatgtttttaaagattttttcaatttgagataaaatttatacacggtgcaatctgtagattttaaatgtacaattaaatttgttttcaatattgtgaatatccatttcaaatttaaataagtaaataccctaaaaccccataagttttgaataagtgagtactcatgttacaggaaaggggccctcatccagaccccaagagagggttcttggatcttgtgcaagaaataattcagggtgagtctgcaatgtaaactgaaagcaagctaatattaagaaagtaaaggaataaaagaatggctactccatagacagagcagccctgagtgctgcttgttgcccatttttatggctatttcttgatgatatgctaaacaagaggtggattattcatgcctcccatatttagaacatatagggtaacttcctggtgttgacatggcatttgtaaactatcatggcgctggtgggagtgtagcagtgaggacaaccagaggtcactctcgtcaccattttggttttggtgggttttggccagcttctttactgcaacctgttttatcagcaaggtctttatggcctgtattttgtgctgacctcctatctcatcctgtgacttagaatgccttaaccctctgggaatgcagcccagtaagtttcagcctcattttacccagctcctatttaagatgaagttgctctggttcacatgcccctgacatttccccactcccttttataagagaacccttaattctaagggttacagagggataaacatccatcttctgtaacttcttcaggctgaataggggtgatgatattccagcctaactatgagggtctgttgcattcagggtagagaggggctcagtcagaaagcatcagtatggtaaggtccactcaactcttaagttttgacaaaaggtgatatccctcttgtttctcatgagcagcagtcagagatcagtggttggttcacaggaataagcagggttagcctaaattgtagaaacaagcttaaaaacaactaatgagactagaatttaataacaagtttaccaaagttcttgaaaaataatatttctgtctccagtttctcatttttactaaagactaatcatgttaagagttatttcctttattatacttggcctgattatttgtataaagtgcagcaagaataattatttttcacagaggctctttttaaattggctttgatggaactccgttccatagaaggaatcttagctaagactttttaaagctaagatcagccatgggtttgtaccctcaaatacctaagagttgaataaattcctctcctcttggggtcccaagataacttggggctcctggacctgttggaaagtgacattctttacttaccccgggtcagaaaccctgtacagggactgttgcagacaaggtatgaggccaatttttcacagaacttttaatggctttacaagtcaagtttgattccttaaaggaaagcataccattccagttaaagccttggtaaaataatcaatttctccaattgtatcctgttaaaaaagaaaacagattcttattgcacttatgcaaataactatattgccataaattaagaatactcacagtttccagttttggagaaaacaggtagagagaatcaaatatgctccaaattttgttcacaggagtatactttactcaattgctaaaagctgtatatagctcaaaagaaaagtgtccttgattctgaaaaataaaggatcagcagcattttaaacacagttaaaaaattacttctgttttctgttggttcagttaattcagttaactcccattctatttgatattcatgaacattctagttcttcatgagaaatggctgaattgagctgattaatacatacattatctcacacacttatttttgtggtgagaatacttaaaagctgttctttagcaagtttcaagaatacaatgcattgttattaactctaggcattatgttgtacaatagattgaatttactcctcttatctaaatgaagtttttctcttttttactaacatctccccactctctatctccctatcccagctttgataaccaccgttctccgttgtacttccataagttcaaattttttactcttcctatataagtgagattatgcagtacttgcctttctgagcatggcttattttacttaacataattccctccaggttcatccatgttgtctcaaataaaaagagtttgattgtgtccaagagtccaaaagctgaagaacttggagtctgatgttcaaaggcaggaagcatccagcatgggataaagatgaaggctggaaaatgcagcaagtcagcttcttctaccttactctgcctgctttttctagccacgctggcagccaattcgatggtgcccacccacattgtgggtgggtcttcctgagtgtgggtcttcttctccaatttcactgactcaaatgttaatctcttctggcaacattcaagaaacatgcagatacagccagaaacaatactttccatccttcaaccaaatctagttgacacttaatattaaccatcacatatgcagtcacaatccttgggagatactggaaagtgggcattttgacctgcttactctgcactgagctagggaaaattgtgcctgtttgaaaccacctctttctttcatttggtcacgggggacttgtaaattctgaacctagttggctctcaaaagtagctgatttaagaaccagtccatttgatggcaactataaaacttggagtgctcaatgtgtggacaaagtctttcaaggaagaggctggagatttcgttttatcactagtgtgagcagtggggaaaaggcccaggaagtgcctcatgcatgttcaggctccaggcagtggggagtaggagagttcttactaattacctgtcatgtcaattctcagatgccagctagtaagaagacatattctgagacatcagctgagtaagtgtacagtcagattccttccagggagaaactaggatgtgggcattgttgcctgcttgttctacactgagcccagaggaatttagtagagagtgcttacatacctgtttaaggcaaccactttgttctccttgttttagaaaaaactcatggatgctgagccacattcactcctagggtgatttaggagtctttctcttaagtgagagctgtaaaagtcagggtgctgtatgtgtggtctaaacccttctctcctcggggagaagcttggagtttggggttccctccaattttaaggtgctgtgaccagggtagattttgtgacgtaagcatgtctcagcttttcctgcccattttgatgtgaatacttttttagttgcagtgtgtaggagtcactgaactagctcctgaatttttcttagaggaaatggacctgtgtgcagctctttacttgtgcatctctgggaggaggtcaagtggggagcttcctattctgccatcttgctgacctcttctctgctcatttctttttagtgttgaataatattccattatctggatgtaccacactgcatctattcacatattgaaaaggattttagttgcttctaagattttgtaattgaataaataaaacttctatgaacatccatgtgcaggttcttgtgtggacataaattttcaattcctttgggtaaatataaaggaacgtgattgctggatcatatagtaagagtatgtttagttttgcaagacaccaaaataccttctaagtggccgtggcattttgcattctcatcagcaataaatgagagttcctactgctccacatcttcactgacattgtgtggtcagtccagggtcccatgttttggccattctaataggtagacagcagtaactcattgttttaacttgcaattacctgatgctgtatcagtggagcatcttttcatatgcatatttcctacctatgtagcattttttagtgagctgtctgttaaagtctttggaccatttttaaattgaattatgtattatcttattgttaagcttcaagagttacctgtccattttagataacagatttttatcagatgtatctttagcaaatatgtttttcctgcctatggcttgtcttctcattctcttaatatattttgcagagctgaagtttttaacttttatgaaattctgtttaacaattaattttttcatgggttatacctttgagatgtacctaaaaatcatcaccatatttaaggttatctaagttttcttctatgttatcttccagtggttttatagttttacattttacatttagatctctggttcattttgagctaatttttctaagagatgtaatatctatgtcttcattcattctttttgcatgtagatgcccagttgttctggcattattcattgacaatactttctttgcacctttatcacaggttagttgattatattcatgtgagtctatttctgaactctctgttctgttcttttggtctgtttgtctaatctttcaccaatacgacattgtcttgtttactgtagctttatagtaagccttgtagtccagtagtgttattcctccattttgttcttgtctttcaatattgtgatggctattctgagtcttttatttctccacataaactttggattcagttcacaaataaccacaaaataacttgctggaattttaattgagattgcattgaatctatagataaaatgaggaagaactgacatcttgacagtatcaggattgtctttccatgaacctggagtatttttccatttatttggttattcttttatatctttaatcagatttttatgtttccttatttagatcttctattttttaagactgtatctaagtatttaattttagggggtgctaatgtaaatggaattttgtttttaataaaattatacttttttattgctagtatagaggaaagcaatttactttcttttattaatcttcaattctgtaaccttgctatacctgcttactagctacagaagatttttcttaaatttttaaaaaattttctgcatagacaattgtgccaactgtgaacaaagaccactgtatttcttccttttcatctgtatatattttatcccatttttgtcttactgcatcagctagtgcttgctgtgtgatgttgaaaagaaataatatgagacacccttgccttgttactaatcttagtgagaaagcttcacatttatcaccattactttttatgttagctataggatttttgaatttattctttatcacgttgaagatgatcccctctattcctagtttactgagatattttatcatgaatgggtgttcgattttgtcaaatgctttttctgcgtgtattgataagatcgtgtaatttttctttttcagcctattgatgtgatgagttgcattagtggatttttaaatgttggtcagtcttgcatatttgtgataaatctcacttggtagtggtatatactgttttatatacattgttggattaattttctaatgttttattgagaatttttgcatttatgttcatgagagttattggcctgcagttttcttttagtgtctttggtgttttaattcaattatcaaatttctattgctgatattctcatatatggtttcattttaattgtgttttgaagttcttgaatacatttaaaatagctgtattaaagatctatgtacaaatcccactctctgaattctgactatttttcatttcctgtctatttaaatgtctaattatgtatagttgttttctggacgttcagataaaagatatatagggtgttgattgtgatgttattaaattattaacattattttgtttctatcaaaattggtttaattttcagtttaagtctcttttatatgtgaacagagttctaagacatgctcttcctccactgcattgtttttattcctcagttgtgaactttctgctgacttaactgagtttgtggtgtcttcaatgaggtctccacaccttgactgagatgaaaagattaagtcaatgatactactattcagctgtcagttctttggcaggtgttatatgctaggtcttttataatctcactatgtgtatgctcatacatatttgtggagttgccttcttacacagattccaacttttcggatactgtgttacaaattctagctgctttgcctcagcagcctggaactcttgcttcagccaccttagctcacaaaaacttctccacttttagtccactttcctgcttgactttagacaaagggttcaaagaaaaagccaaggcaattttaatatgattgataggctcaccttacttttctttcttccttcaagggtcacagacctgtgttactttctcaaggtatccgcatactgttgctttatatattttgttcaattttatagctgcttttagtaggaaaccaagttcagtatcaattactctgttttggccaacacctgaagtcagcagcatctgttttcacatgaaaattagcatatgacttcataaaacttactttcttgagtagattaaagcagacttgagcagtatgagtgaattttcctggtgtgtatatgtgcattatttaaattgtctagataccatgccaaacactctagctctatcttgtcatgtggtgctttatttttcattttgtaaaattgtatcaatgaccaccaactttctaaagctgtttaagaaataaagaagataatccacataaaatttctttgtaagctataaagtgctaaaaaatgaaagttattattatagggcaaaaataaacatttttgttcagtctttgattataagttccaacagaaagaaactagaattggttattcctaatggcatttttcccctttaaatttttacaacagcattaaactggagaaaataaaagacttattttatttttgctgagcaagggaagatgatctaactattctaagttaaaaaggatttggaagaataacaactgtcctgaagtgtatattaattccttaaatgtatgcagctctaaaattgtaagcaagtccatagactagtgctgattattttacaaaatattctatcaccttcaaatccaggtttttgcctggtgactttcttactctattttttacctactatataatgtcagagtacctaattcttgaagtcattagaagacatttaataatggcaccaatactttttctttcaatatttaaacctgtttctaacttaaattattctttttgttgataatgagttattttatttacaagttgaatatagtggcatcattttttagaacaatgtagtgagacatttaagaaatgaattattttatttaccagaatattttccccaaggttctcatttgggaggaaattaatttcttaaaaatacaagccaaataggttagtcataattttatgataaaaaataacagtcacataaaaattttggcatggaacacaaaatcctattagtagcaaacatctgtgacagtctaagagtggcacataccacgggaacctactgcagtgctaatcattcttctaagttatttttggggatatggaggagaaattctgttgtctcaaatagggacatgaacttctcctcaatttagcaaaattaatttaaattggctggcagcttatcacaccatatgtagggggtattcctaagaagtaaaaagacacaagaaaaaaaaaaccctttaaagaggtaaaaactccattgtagaagaaaagagaagcatggtagtcattaagcaatctaagaccatcttttttcccagagctctaagagatattgttgctctccgttttctcatgcttatctctattggcagagtggtctgaacagcaggggaaaacaattgcaaaaggtatagtaattagttttgaatcttacagagagagacagagtaaataaataccacaggtgctgtctcttaaatgaggcaagaagagtcaaaataataattagcccatataacaggtaaaggcacaagaaagaagtggaaagagaagacagagtgaagaaataatataaatttgatattaagtatctcttgattagaaatccttatgtggagacagcatgaaaattctctttgtaatgggatattcagttgtgcatgcaaagagaaaacaaatacataaagtttttcaatgcgtgatcctcattaccataccagtacccaagcataatcagttccaattagttggtcccaattaatcaacaatcccaagtaagctaacaaaacctcatgatgtctatttagcgtgtccagcaaaatctattaggaaagagaaggtataagaaatgggttggaatatgtttctctatttgttttccttgtaaaaagaaggaggaacactaacactttttatcttatcagtgatttgcgttgattgaaaagatgatagagttgcctgatgcattctgagacccatgcaggtaaatgtctacacatgtggatgggaattcaagagtccgttgagccccaattttttttttgacacttatgttctgttagtatttttccttccatttaccctgcatttcagagcaaagctagatctattaagtgtcatttacaacaatgtacaacttgtgctagcaaacattattcaggttagaaggtaatttacagttggtcagaggaacataggctgctaaattttattttttatcagtaccatgtgtgtcatttctggtatagtttagattgaactaaattgaatagaatgatctgagaatattagcattatttgtctttctgtacttcttcctttctttcacattacttctttcttttaagaaatacttttcaaaaactacataaatcatttacaaaataactattaaaataaagtttatttagaattactcttatttccctggcatttatcttaaatgtcaacactacatgctacatatgcccagatttatcataaggtatccagtagttaaaatatgtaaatattttattgaaaatgtgtgtatctatttttaaatgtcttttagccatattttgtgtttaaagaacaacatctacctttttatatttaggttcaaaaaactgggggggttaaaaaatacatatttgtcatagacctctaaaatcatgaatgtttcttctttcgtttatcaaatatctactgaataatgtttatatactcagcttttgactagcatttaggtgtgcatagatatataaaatagcctctgaagatatacacaaatatttatagtaaaatatatcacatggaatactagatatctaaacagaatatattgggagcaaaaaaaaggttttgtaaatgtttatcgaaaaggtggagaaattccacataaattgttaacatttacatctgggatttcagggtgagctggatatctcagggagcacagggtggtgggtaggagtagggcatgtcagaaacattcaacatcatgagctaggaagagacgaggaaaggtaagggaaaatgtatttattcatgtagcaaatagctattgagcatgagactctgtgctatgtgctagacactgttcctaggcagtggaaatacagcagtgaacaaaacagaaaatacacagcctcattgaacagagagtctaggagccttacactgacttttgtctgtgaaggagcttgaatgctattctaaggagttttacattcattggattgaacattatatacaattgaggttttatttagttaggtagtggcatgatcagatgcacatatcagaacacaaactctgtggcattttaacagatagaccgtgaagaatgatgaaaggtgaactgatattaaagcagcctggaaccaaattaaagaaggcatggaaggtgtagaaagaagataataaaacaaaggtgtttagaagatagtttttttttaatacacggggtctaatagaattggactacattaaacaaatatgaattttacatttctagcgtaagtgcctgaatctttctaattcgtggtgtggtgctaaattaactccttttatttattgaattttttatagagaataaagtaaatgcagatttggatgtgaacataaaggaggaaaatgagatgagcgataatgctgaaatgctgatgtatgtgcaatctagaattcaggaaaaaagcctgagctggagccatctactctgtggaagttgaaattatggagctagaagtcctgtattaaaaagaagcaaagatattagagatttttaaaagcaggatacttagatgaagtcatcagtctccttcctcctcctcctcctcctcctcttccccttcctcctccttcccccttcctccttctccccctcctccttctcctcccctttctcctccttcccctcctcctccccctccccctcctcctcttccttcttcttccttccttcttccttcttccctcttcctcttcctcctcctcttcttcttctgcttcttcttcctcttcttctctttttagtggagccccttatgagctgtcaaccctacaaagtagagctagttattggtctgattattagactaaaaatttgtggttggaaaggattctatttctaaatataaacagcactagagtttattcaaaattattttttcatacacattatgtagaaaaagattctcctaaaggttgtttttgcttaagaaactcttgttgcacaaattggtatattctgtattaactgtgatatcccactggttaaatgcttgaataataaatattataattgtttatcatgttcccaatacaaagctagatgctggggtacacctccacctcacctattcatcacacctgagaactgctcagaaaccagcattgaaattgatggttagatacctgaaaatacctgtttctatgttaaatgaacctttgaaatggtttacaatttcatctccaggttgtactctgtatggcatgagaatttagcttctagctttttgaaggaataagttataagccagtctggcagttgagtagaggacaatactatggttaggattttcagtagtttcctcagaaaacaggattgatgtttccattaggacacaatgctataaatacagctgtttactgctgcctgctattattgtgtgccaggcactgtacataacacatatacagtacactgtactccaacaaatctcagaatcatcttgcttttggcagtgagtagggtaaacattgtctacaaggctgacattccaaatgtgcttgtccttaaatgaggagaaggattatggggcaggagaattcactagacttatcttaattgatgaagataatatttaaaaatagattggaaggtataatatcaatttatatttgaaaaaaatcccaatctttttaaaatgcaaattatagagagtaaaacactctggattttgaactgggttaacatgaatgtaaaagattgagggactttgtgttaataaatcttaccttctacctccccagccctacacataccttatcaactggatatgccttaaagatattaaaaccaaaactaacttgaaattcaaatccctaaacatggtcataaaatcaccagacatactctgtttctgttttccacctttagtccttcaccccagccaaaccatgccacaccaagcttcttccctaccgtgcttctccaccatagccactgccattttatctttcccagagttcccggagccttcactgtcttcatgattagatccctccatactctccatcactaatgccttggctggagattaccattcagagaccatgtactgagcagataaatgccaatcatcacagcattgtctcaggtatcatcattgactctgggattaagaaacaatatgtcactatcctaaaagttaaccaagttataactcaagagatcgtatgatctgttctagaccacacaagtcaacatctgttataattaatgttaatttggtttcaaaggacaaaaaatatataagctaaagttaaaaagaagggtcttcagaatatgagaaatgtcgtaagatactttacaagaaatacaacgtctcatgttagtcagtcattagtcacttttctctcttctgtccctgccttctgcccgctctgaccctttgttttattccctctcagttgtcacatatttttgcttctctctgcatatttgctgtattcatttctgtgtacactggctttctctacaataattttattttttattcttctcaatcttagctttccattagctttgcttcagcatagcaaattctggtgctaaatctaacattctaaagcctaacattgtaagcctataatttatttatttattattttgagatagattttctctctgtcatccagactggagtgcagtggcacaatcatagctcactgcagccttgaactcctaggctcaagcagtcttcctgcctcagcctcccaaagtgcatggattaaaggcatttagtcaccaagccaagcctaaatttatagtatagagatggaatatggtcacccttgcccaacctcatccttgagctgagaacctgtggtgttggatcagtgaatacggcagtatcacagaataaaagtctgttcatatgagcccctcatgctgccctggactgctagtggggccgtattctaagaaaagggaatttagagggaaaacagtcataattatagcagcagagtcaggtcaactctcctctgatttcagtctttgcactttccactacccctggttgagcaaatgtctatgtttttatcatctttgtattcccacaacactttacaaaacatctagaaattgcagatgctgataaaatgttggttgatgtgatgaccttgaagtgaatcaaactaacatttgcaggtctttgatatttcccagcctttccatctgagagtcaactttcagttgactgttagccaaggtttccttgagccaaatccctaggcagtagtgagagggagaaatgagagagacaaggagggtttttaagatctatgattaggtttcacgagcagcattttgaacttggaataaaggagaacacagaaatgaaaactcattctgccatatggttcctggacattcttgtgcaactgccagaaaaaaaaaatgattaaaaaaaaaaaaacccacaaaacaacaaggcagcaattgtgacagaataatggaagtccaaattacagaggcaaggttcttcttctgtcctccctccaggcctaaatgaataaaggcatgacactgagattgaaggctagttctacttcagaaccacagagacatgagcaccagcaagtttgaggttggataaggatcttcagaactcctcagcttcagatggtcaagcactgcttcctcccttcttcaacggcatctctagcatgtatacttcccttaaatccaccttcgtagcatttgctgatggtaattcagggactagaaaagcaaacttttagagatttaatttttttctttctttcccttgaaactcaggtcttattatttccccatttcccttctttcacaccctgggaagtccccagagaaattcaccagtctggtctgcactgtagtttgggttggcagatgctgcagagttgtaagaaccatctatttttttcctcttttgcaccattccctcttctgtttacttatcatctcaaatgtttacaatccagtgagaggccatataaatttattaaacctccctgttgtttttcttttcctttaaaagagatgttattttaagtttttctttcagtttcttctgattttcagaatagttcctcggggctctcattatttggatctcctactgacttaatctgctctggagcaaggagcttggaatttctttgactttaagctgcagcattaatctttcgcccagccttaaagggtttagggtggagtctcttccaaaggagttgctgcctgtgtagctaccaggttagcagcaaagaaaccatatctggtctcctctgtggaaagcaatctgccccctgccagcagctcagctttgcagccacagcagagcaagccctgtgttagctgggggacatttccagcgagagggacggcaggggaaatgatgtggactccatcaaggggagaactgctcatccatatcatctaattccaggaagaggcacaacagagtccatgccttcacctcctctggccaactctaatcatgaatctcctgtgaatcagctgggaaacatgcagagtaattgcttccctcatgttcttcttagattttttaaatgaggattttaatttccacaccactgttttctgacctctccattctttcctttcctctttcttgtgcacagatatgagattggggccctcattcatactaactggaattttccttggcaatggtagaacagaagcttctccattctttacagatgaatttgctttaagtaagatcttcccagagtacaaaagaaatttattcggaaaatttcaaactaatgtgagtgtgtcttttttataaactttgataatttctacttcagaggcagagttttgttagattgataattaattctccacagctctcagaaaaatgtcttgcatatattatgcatttgatgaataattattgaatacatgaatatagacatatctatagagtaacctggtcaatttttatggatgacatcatatgtttcgccatacagagctccattatgctgtgtctatacaacaaacagcactgcattcatgttgagtgcaagtatgacttcaccattgaatattttttatctgaattgatcgttttaacctgctcttctctaactgtgataccatcatgactagaatcctctcagctcattctcctctttcattttgtccttttccctttattcttgctgtttaatgtgattctctcattggcgacatgggctcccctcaattacgactctatcattttccatgacagatggccttctcactggaactggatccaccatcccttttgctcagtgtcgtcttgtttatgttttagatcctttgcaaggtgagctacacctctgagaggagctcctggaaattaccagatacttaatgttgccagctgttacagatggaggtgatgcaccttgatgatgcataagtactgagcctgaatcctacaaatgggaaaaggtgctcatatcagacttatgcattagatatcaaactacaaaatacaagtgcagttgatacctgtttagatgatgtagagcaaggtaacagagtatgtattaaaagcaaaaattcccatgaagctgaaccgttactctctgccaaaacctcccactctcaagttttaagagccaataaaccttgtatctgtacgttcagctttgccttttttttcccaggactgtaaacctctgtcaaggtttaccatgtttcattgattttattttttctagcaccaacataatgctcatatagtaatgaggatgaaataatttatttttttcctgctcatcgtgtcattgtgaatgttctgctatcatacaaaaaaaaccacactttatttaaaaatatttgctgagcaaatataaaccactgtgcatttttctgagcaccagtaagacagccaagtataaaggggtccccaaagaaactctgaccagcctgcacacttggaggagtgtacactggggtggagccttgggaagttcatgctgtttgcagtggggaggagcctggcctctcctgatctggggtggtaaactgagattcaatctgtgaggcgggaagcatattagcaggactatttctttgctgagagtccctgtttccttttgtttccttttcacccaataaaccctgcccttctcacccttcaaagtgtctgtgagcctaatctttcacggttgtgtgacaagaacccagcttttagctgaactgaggagtaagtcttacaacaccactatatagtgatgaaaaaaacaaacaaccccaccttcactgagtttacatttaataaaaacaccaataaattctttattattcctgcaaaatcaaatcacttggacaatatcctggcttccctatattggttaatctaattattcaatattatggtattgtacatactatagactgaatatgaccttgtttaatcacatttgtgaatttcaacttgtctttatgaagtttcgcatataatcactgacttcttattgctgtacatttctttatagtattttttgaattgatcccttactttctagttcgggtgtcttcctgactccctcatttcttccctctcaaatgttttccaattggttttacttttccttggccaaccttatttttatccagtctacatactcctgttacttctacctcagtccaaactcttttggtttcagacaacaaaatcttatttcaagtaaaataaacaaaaaggaaaaaaaatacaatataacaatacaaaggtataataaagtataataaagtaaccaaaggaagaaatcaggagaaatatttagaaaaaaattgcatcagggatcagacatacggcagaaactgaatttattttcctgttttttccagaaaaccatgatttttcatcttttctctctgtgtatccttcataatatcttttctttttttaaaaaaaattatcttcttttgtgttttctctttctttctccagtttgccttccctcccaagaatattcatccttttttcaagtgcatatggctcaaactatataactttaagcatgcactttccatggtctcagtttagttgcctaacaaaccgtttagaatattcctaacttcctttttttcccctagaattgttgacatctgacatccaacttatgcctgcccattttagatgaggtattcatttcccatattttaccaaaagtaaggggaagaaggaagttggggaatggtgttcaaagccatatcttataaatacaatttccatagtttcacaccaatgatgggtggatggatggggccagtcctcccagagaagggatcctggattgggcaaatgctccaattagtgtaaagcctttggaacttctattcatagttatactattcaccttcatactccagtttctcttccaactatcactgccagccttatgcaaccttttctctatgattcttatatcttctgccagatggagtttattcactttctcataattttctcactcattgctatatgatttatgcaatcagtcctttaaacttcctctatcatatgcgttgcaaagaaccaaagcccacactcaccacaaagttttgcttaaattaacctcccctctgaatggtctccagattcttatccagagcttattatcattttgattttggtattattatttttaaaaatataacttactaaatattatatattaattacaattatgcttgtaaatcaagtttggttattttgtgaatttaagtgttacttcatacatctatttgtaagcttcttaagggcatttcctcagaaaatgtcacacaatagcaggaatttaaggtagtaaataggtaatataaagagaaggatgtaaaaaatattaaacacattctgtgccaggtgatagggtagacactaaattaggaaaataagctcaggaaaactttcccagaatgttttgatcatttgtgaccttactggaatttaaaacctaatcttttcaattcaaagtctaaagtctaatggtatctattaaactatgtgaaagtaattttacttgaaggaaacacactttagttaagaattttaggccaggcatggtggctgacgcctgtaatttcagctctttgggaggccgaggtgggcggatcacctgaggccaggagttccagaacagcctggccaacatggtgaaacactgtttctactaaaaatacaaaaatcagcctggcatgttggcttgtgcctgtggtcccagctacttgggaggctgaggcaggagaattgcttggactcggggggcagaggttgcagtgagtcgagatcaccccactacactcccgcctgggcaacagagcaaggctctgccttaaaaaaaaaaaaaaatttagtcaatggcccataatttgagtcagctaatgttggattagaaagtctcctcatccatttattattactcttctgtatctttctgagtaaccttgtgtttgccattaatttggagtctatggacaagaaactactaagatagcctgtctttaaacaacattctctatttcagattctacatgtttagactgtcagtgcaattaatctgaataaatgtatttattaccttctgccccaaaacgtgagtctgtctttgggagtttgtagcttgcttgaaagattatgagacttttcccatgcagggaattcatatgaattccctgcagaaggataacatatatactctggatttggggacagcccattgtgcctagtaaaaaagatactgtgggagttagtcatttttttatgcagaaaatttgaaaacataacagaaagaaaaaaaaactctttagagatttttcttttgcattatattttggtaaatggagacaccaaatggtatgtttgatagattctaagaaactgttcaactaatcaacaagcattggtaattataaaacctctaccataagctaacttctatagcactgttttttttaaaaaaaggaaacatgaacatccagtcctctaatctccagaaataaaggtataagtgaaatagtggcaaatattgcataactaatcacatttttgtttttgatttaatattgcatttaccacactcactcaggcctaggtgttttttttcaacttcaacacaaggagaaatgctggctaaatcccaggcagagcgtgtcctaatttaggccatgcagaaagcactggacgtattcaaattcatgttgggtacaaattgtttcattctgtgacttttgggaaagcaatcaggagttaagggtcaagggtctaagttagctgggcgtggtggagggtgcggtggtgggcgcctgtagtcccagctactcgggaggctgaggcaggagaatggcgtgaacctgggaggcagagattgcagtgagtggagatcacgccactgcactccagcctgggcgacagagtgaaactctgtctcaaaaaaaaaaaaaagagtcaagggtctgttccagcagtgggcaggaagggatacagctctgataggcagcagggcaccacatggagttgggtcttactccctgcttatgagtgaggttttttcaacatagtgacatcatgtcccacccagcacagtgcacacctatacttcctgagaagtgaaacaatttgattcaaggtctcactgtaaacaatgaaatgttactctcttgagaggggagggttggacatagcacatggaggtcaatacttagcagtggtgagcttgcttcttgggccttaataatatctcatttgaacctcataacagcaccatagcatagatctgattgctaatgttggaaatgaggaaacagatggtgaaaagtttaagtatctgagccaaagcagtcagaatatgtcaaggcaagaatttatttgaattcaggtctccattgttcaaactggtaggtgttggtgtctaattgacagtgacacatatgatgagaaagcaaatacttactgcatcatattcagaaaggcagtggaaaaatacctgataccaaggataagaatcagcccttcaaatattgggaacttatttgaaactgaccaatcctttaaagtcttcttacttccttcccttctactgaaacaaaactctaaaatgaaggcacttagctaattgtatcaatagcacttatttaccttattttaaggtaaaatcaaaagttcatatatgctcattagaatcaccttattccttagctatctttagtgctttccttcttaacagtggggatttggattgcagtttaaaatattttatgtactacactgcatttctcatcaattttctgtggtagacacagaaatgttctaccccgataccccttcagggaaagacttgctgtgatattaacctgtatcaggggttggtgttggggatggggagttttatgatgaaattatgagaattaggtatgcttctcccttcactttgggaactctcctcaaccaatcatacttcatggaagagtaaaatgattttaatggagaagcaaagagaagcgaaaattcatgatattttgaatttcaaaactcaatataataatttcaagaatatgataaaactttcgggaatttttttgaactcaagtctaagattaaacaaggggcaaagaagaacttactagaaggagttttattttattttatttttctgccaggattcctctggcacagaagactagatgaaacctctgcctggcatggtccctatgaagaaagtagcctcagctacataaggaatattctcaaagtcccaatctgccagtctggtagtagtagaacagtagaattcctccatgtataaggcagagaagcaagcttgacagagaatgaagttgagagccccaaagagtctttttaaaaaaaaatttattttcataggtttttgggaaacagataatatttggttacatgagtaagttctttagtggtgatttgtgagattttggtgcactcatcacctgagcaggatacactgaaaccaatttgtagtcttttatccctcaccccctcccacacgttcccctgagtccccaaagtcaattgtataattcttacgcctttgcatcctcataggttagctcccacttatgagagaacatacgatgttaattttatattctggagttattttagttagaataatagtctccagttccatccaggtttctatgaatggcattaatttattccttttttggctgaatagtattccatggtatataatggaatatatacatatatatatatatatatacacacacacacatatatatatacacacatatatatacacacatatatatacacacatatatatatacacacatatatatacacacacacatatatatatacacacatatatatatctcacaatttatttacgcactcattgattgatgggaattagggatggctccatatttttgcagttgcaaattttgcttctataaacgtgtgtgcaagtgtctttttctctgggtagatacctactagtgggattgctggatcgaatggtggttttacttttagttctttaaagaatctccacactgttttccatagtggttgtactagtttacagtcccaccagccatgtagaagtgttccctttttaccacatccatgccaacatctattatttttttttattatggccattcttgcaagattgaggtggtatcacattgtggttttgatttgcatttccctgatcattagtgatgttgagcattttttcatatgtttgttggccatttgtatgtctttttttgagggttgtctatttgtcttcagcccactttttgatggaattttttttttcttgctaatttgtttgagttccttgtagactctggatattaattctttgtcggatgtgtagattttctcccactctgtgggttgtctgtttactctgctgactgttccttttgccgtgcagaagctctttagtttaattaagtcccaccaatttatcttattttattgcattagcttttgggttcttggtcatgaagtgtttgccttacttaaaccaaagtctagaaaggtttttccgatgttatcttctataatttttacagtttcaggtcttagatttaaatcctggatccatcttgagttgatttttacataatgtgagagatgagagtgcagtttcattatcctacatgtggcttgccaattatcccagcaccatttgctgaatcgggtgtccttttcctactttatgtttttgttttctttgttggagatcaattggctgtatttgagtttattcgggttccctattctgttccattggtctgtgtgcctagacttcaagtatggagtcttgaagttctgactgggtttgttgttctggaatacttcatcatgaatatattgtgagagattggatactagattagctaaagattagctaaagagaaatattaagagaaaaagtggaggatgtgttagtctattttacactattataaaggaatacttgaagctgggtaatttatataaaaaaaagaggtctatttgactcacacctctgcagactgtaaaagaagcatggtgccagcatccatttctggcaggacatcaggaagcttttacttagggtggaaggcaaggagaactgaggcatgccccatggtgagagagggaacaagagagtcaagggggaggtggcacattcttttaaatcaaccagctctctatgtaaactaatagagccagaactcactcattactgaggggacggcaccaagccattcatgaaggatctgcccacaagacacaaacacctcccacgagatcctgcctccaacattggagatcacatttcagtgtgagatttggagaggacaaatacccaaaccatattagaggaagaagaggaaagagaggattaggagacagggagaaagggtgggagagaaagaatgaaggaaaggaagaaatcagtagaaaaaataataatttcccagggctaccaatttggaaaagttattactgaaagaatcagaaaattagccaatatatctgtctaaatactccatgttttcttgaatcctatcttcttatccccttccctcatagtcaggagctccacagtatcagtgtaaaagtgctcctgagagataagttggtaaaaaattgttgcagatcagtctgtcatatttcaagtcactgaatggcatctgttctctatgaaatacagtgtgatctcatcttctaaatgagatgaaaatgatagcttgggaggggatgaaaaatacaaatacattgcagtgtttaaacaaatcaatgttccactttactttgaaagccaccaaacaaacaattgacacccagcagggctggcacttaaggcagctccaggcagctaccacaccagccatttatttccatttcctgatacccttggaacatcattagcaacagggaagcattaagaccgcaagtgggacagattcacatctgtctaggtaactgtgagagctaatctgtttgtaacactagagagatgcttagaaattcacttttgctgatgcatttgcctctccagattgactgcaaacatcattgccaaaggggttccttcagttttgtctgtctccatggaaaaacttaaatttttccctaaagaaaatgattagggattgcctttgcattgcaatccaaaggcagcccatgcttttctaagtgatttatacttttcctcatgaaaaagagatgtctcctataataaaccttaaaagacaggccacaaagtgggagaaaaagtagtatcttaatgccttcttatgcacgttcttgaatgttctctctctctctgtgtttccccaaaagataaatgttttaggtaaataatcaaccaaggtctcgattttctcctttgctttcagagtatgttgtcaagctttgtaaattttttagcagctgtcagagtaaatttattaccagagatgtctacattcttatgtaatccagaagggaaagttctggtgatgggttctgtttcagcctttgaagaccaaatgtctagcaagattaggatgcaaaaacagagttggccatatgaaatctccaactgccatctattatgcagtaatgaataaaaacagatcatcctaaattgcaccacttgcaacttcccttcagtcacataaccaacaactacatagaaaagctagcttgtctggaattataaatacatgcttttgaagattaaatatgcggtggatgtattttaccgaaaaagaagataataggttcctactttagtgcataatttgttttaaaaaatgcagaaacaaacaaacaaagcacagttcctgaagtccagtgggaaaaaaaataggtaaaatagaaaaaagaaaaaaatcatcattatttatagagagaatactaatatctgctcccttcagagtctggggagaattctcctgtcattatggaaagtgacatttgaaacatgggttagggatttcaaacaaaaaacatttcgtgacctaaatggcttgcgattaagacaatgccatgcatataaaaattaaacatagcataggatctacacaaacatgcaagcatagatttatagatagccattaggtgtctgtagccaatgtgaagctatgttacaaataggtagataaattatctatgggaggagaaggtgaagcatgatggccaaatagaaagctttactgatcgccaccccactcaaggccaccaaattaacaactatctacacagagaaaaaaacaccttcataagaactaaaaataagatgagcactcataataccaggttttaatttcatattgctgaaagaggcagtgaagagatagaaacagttctgaatcaccaaagcccccacttccaccatgccctggaattgagatctggtgtggaatgcatttctggactctgggggagggagatcagtgccatactattacagcagaaacgaaaactggacaatactcagctgacacccgcccatggagggatcttttaaaccagccctatccaaagggggatcacctatcccagtggtcagaacttgagtgtctgcaaacctcaccatccagggctacggcactctgtgtcttcaagtaaacttgaaaggcaatctaagctataagggccgcaactcttaggtgagtcttagtgctgacatgaagcctagagacagtggtttgtggggcatgcgacatactgagacacgagctggggaagccaaggcagttcaggcatcacccctccctaaccccaagctgcacagctccggtttcaaaagagacccgttctatccacctgaggagtggagagggaagaatggggaggatgactttgttttgtatttaggatacaagctcagccacaggaggataaggcactggtcagatttatgaggccctcattccaggctctagctcccagatgacatttctaggcacaccctgggccagaagagaaccccatgccttgaaagaaggaacccagttctgccaggatacataacttgctaaccacagagcccttgggctctttgaatacccagcagcgatacccaggcactacatcgagggtcttgggtgagcctctgagaaatgctggcttcaggtgagactcagcacattaccagctgggcacaactccttctgcttgagaagagcagagggaaaagtaaaggggactttgtcttgcaccttaggtgccagcacagccacagtggggtagatcaccaaacaggctcttggggtccatgattccagaactagactcttgggcagcatttgtggacctaccctgggccagaaggaagcccactgccctgaagcatgagtcccaggcacgacaagctgacttaagagaccctgggccttaagggaatatcagtggtagtctggcagtactccttgcagcctggggtggtggtggctacagggtgaggcttctctgcttttggaaatgggagagaagaactgtgtcttgtggtttgagtggcagctcagctgcaatacagtagaacaccaggtagaattctatagttttttactctagtccttgactcccagatgacacttctgtacccatctggagcttgggggattttgccactctgaagagagttacacgggcctggctggctttgccacctaataattgtagagccccagagacttgaggaaacataggcagtagccagggagaggttacagcaggccttgggcgagactcagctctgtgcttgctcaggtatgaaccagtgcagtcatagtggtggtggtcacagggtgcttgtatcactccatacccaggtttaggttgttcagaacagagagagagactgtatgcttgggagaaaataagggaagggaacaagggtctctgcctggtgatccagagaattgtccttgatcttgtccaagaccatcaaggcagtacgtctatgagtctgtaaaaaccacagtgttactgtgtttggggttccctctaaagcagaaacagcttagatcatttacccaagtccttggaaatatctagaaagccttctcaaggagaatggctatgaataagccaagtcagtggctaacctttcaatgcccaggcactgaaaaacatctagtaccgtcgacatcacccaggaaaacatgacctcgccaaagaactaagtaaggcactagggacaaatcctgaagcaacagaggtatttgacctttcatagagagtgaattcaaaatagctgtgttgcggaaactcagtgaaatttaagggaacaaagagaaggaattcagcattctatcaggtaaatttaacaaagacattgaaatagtaaaaaagaattaagcagaaattctaaagttgaaaaatggaattgacatactgaagaatgcatcagagttctttaacagatgaattggtcaaacagaagaattagcaagtttgaagactgactctttgaaaagacacagtgaaaggagacaaaaaaataaagaataaaacaaatgaaacatgtctgcaggatccagaaaatagcctcaaaagggcaaatctaagagttaatgtccttaaagaagttgtagaataagagataggagtagaaggtttattcagaaagatagcagccaagaactccccaaacctaagaaaagatcaacaactaagtacaagaaggttataaacaccaagcagatttaatccaaagacagctacctcaaggcatttaataatcaaacttccaaaggtcaaggataaagaaaggcttctaaaagcaccaagagaaaataaaaacataacatacaatggagatccaatacatctgggggcagacatttcactggaaaccttacaggccaggggagagtaacatgacatacttaaagtgctgaaggaaaaaaaaagagacaaaaaccttatattctagaatagtctgttcagcaaaaatatccttcaagcataaaaagaaaataaaaactttctcagagaagcaaaatctgagcgagttcaccaacactagacccattctataaaaaaatcctgaagggagttcttccatcagaaagaaaaagacattaatgagcagcaagaaatcatctgattatagaaaagtcactggtaatagtaagtcacagaaaatcacagaatattataacaatatgattgtggtgtgtattagtgcattctcatgctgctatgaaggaatactcaagactgaataacttataaaggaaagaggtttaattgactcacagttctgcatggctggaaaaggcctcaggaaacttacaatcatggcagaaggcaaaggagaagaaagacatctttacaatgtggcaggaaggagaagtgccaaagggagaaaagtcctcgataagaccatcaaatctcatgagaagtcactcaatatcacgagaacagcatgtgagtaaatgcttctatgattcaattacctcccactgggtccctcctaggacacatggagattatgggaactacagtttaagatgagatttgggaggggccacagccaaaccatatcatggtatttaaactacacttaagtacaaagactaaaagatgaaccaatcaaaaataataagtacaacaacttttcaagacacagacagtacaataaaacataaatagaaacaacaaaaagttaaaaagtggtgggacaatattaaggaatattgtttttattagttttccttttgcttgtgtgtttgtctctgcaaaaagtgttaagttgttatctggttaaaataatgggttataagacagtatttgcaagcctcagggtaacctcaaaccaaaaaaatcatataatggatggaaaaaaaattaaaaggaaaaagttaaattatatcaccagaaaaaataccttcaatagaggaagaaaggaaagaaaaaaagaccataaaacaaccacaaaacaaataacaaaaaggcaggagtaattccttacttatcagtaataacattgaaggtagatgaactaaactgtccaaccaaaagtcatagactcgcctaatgaatgaaaaagcaagacccattgatttgttgcatacaagaagcacacttcacctataaagacacatataaactgaaaataaaaggatgaaagaagatattccatgctaatggaaaccaaaaaatagcaggaattgctgtacttatatcagacaaaatagttttgaagacaaaaactgtaaggagagacaaaggtcactgtataatgataaagggatcaattcaacaagaagatctaacaattttaaatatatatgcaaccaacactggaggacccagaaatttaaaataaatattattagagctaaagagagggacagggtccaattcaataatagctggtgacttcaacaccccactttcagcaatgaaccaatcttccagacagaaaattaacaaagaaacaacagacttaatttgcgctatagaacaaatgagtctaatgggtatttacaggacattttatccaagagctgaagaatacaaattccaatcctcagtacatggattagtctcaaggatagaccatatgttaggtcacaaaatatgtcttaaaatattccaaaaatattgaaataatatcaagcatcttctctgactacaattaaaactagaaattaataacaagaggaattttggaaactatactaatacatggaaattaaacactatcttactaaaagaccattgggtcaagacctgaagaaattaagaatgaaatttaaaaatttcttggaacaaatggaagcacagcataccaaacctgtgggatacagcaaaagcagcactaacagggaagtttataagtgtaggctataagggcctacatcaagaaagaagaaaaacttcaaatgaacaatctaatgatgcagcttaaagaactagaaaagcaagaacaaatgaaacccaaaattagtagaagaaaggaaaaataaagatcagagtaaatataaatgaaattgaaatgaaaaaagcacaaaagataaatgaaataaaaatttggcttttttgaaaagataaaattgacaaacccctagccagaataacagaaaaaaaagagatgatctaaatgaataaaatcagaaatgaaaaaggatacattacagctgatactgcagaaaaccaaaggatcatgagtggctactatgaacaactatatgccaataaattggaaaatctagaataaatgaacaaattccaagatatatacaacgtaccaagatcgtaccaggaagaaatccaaaaacctgaacagactgataacaagtaatgagatcaaagtgattaaaaaaagcctcccagtaaagaaaggcccaggacataatggtttcactgctgaattctacccaatgtttaaagaactaatattaatcttattcaaactattctgaaaaatagacatggaggaaatacttcacttccaaacatattctatgaggcaagtattaccctgataccaaaaccagacaaaggcacatcaaaacaaaacagaaactacacgccaatatctctgatgaatattgatgcaaaaattttcaacgaaatatcaacaaaccaaatttagtaatacattagaaagatcactcatcatgaccaagtgggctttacccctgggatgcaacaatggttcaacacatggaaatcaatcaatgtgatacagcataacaattggaaaagggaaaaatataataggcattcaaattagaaaagaaaagtcaaactacccttgtttgcggatgatgagatcttatatttggaaaagcctaaagtctccacaataaaacttttgaaattgataaaaaaattcagtaaagttgcagaatacaaatcaacatacaaaaatcatagcatttatatatgccagcagttaacaatctgaaaaataaagcaagaaaataaccctatttataatatctacaaataaaataatgtatctgggaattaaccaaagaagtaaaagatctctataataaaaactataaaacactgataaaagaaattgaagagacaccccaaaaatgaaaaagtatttcatgttcatgtactagaagcattcatattgataaaacgtccacaccacccaaacaaatctacagattcaaagcaacctctatcaaaataccaatgatattcttcacagaaatagaaaaaacaattctaaaattgatacggaactacaaaagaccaagaatagccaaagctgtactaagcaaaataacaaaactggaggaatcgttttacctgacttcaaattatactacagagctattgtaaccaaaacattatgcaagcaaaaaaaaaaaagacacacagacaaatgaaacagaatagagaacctagaaacaaatccatacacccacagtaaattcgtttttgacaaaatgccaagaacatacactggggaaaagacagtctcttcaatagatagtgctggggaaactggatgtacatgcagaagaatgaaactggacccctatctctcatcatatacaaaaatcaaataaaaattgattaaagtcataaatctaagagctctaactatgaaactactacaagaaaccattcagacaacatcttcaggacattggtctgggcaaagatttcttgagcaataatccacaagcacaggcaaccaaagctaacatggacaaatgggatcacatcaaattaaaaaagaatgggcatatagctgtttttaacatcgagttaaaaagcttctgcatactgggatacaatcaaaagtgaagagcccacagaatgggagaaaatatttgcaagctacccatctgacaaaggattaataatcacaatatataaagagttcagacaactctataggaaaaaaatgtaataatccattccaaaaattggcaaattatttcaatagacatttctcaaaagaagacatacaaatggcaaacaggcatatgaaaatgtgctcaacatgattgatcatcagagaggtgtaaataaaaactacaatgagatatcatctcatcccagttgaaatgtcttatatccaaaagataggctatcacaaatgctggtgaggatgtgcagaagggaactccttgtacattgttggtaggaatgtaaattagtacaaccagtatggtgaacaacttggaggttccttaaaaacctaaaaattgaggtaccttatgatatagcaatcccacttctggctatatacctaatggaaaggaaatcaatatatcaaaaagatatttgcactcctatgtttgttgcagcactgtttacaatagccacgatttggaagcagcctaagtgtccatcaacagatgaataaatacagaagacgtggtacgtatatacatttctattcagacacagaaaagaatgaaatccagtcatttgcaacaacgtggatggaaatggagatcattatcttaagtgaagtaagccaggcacagaaagatgagcatcacatgttgtcagttgtttttgggatctaaaaatcaaaacaattgaactcattaacatagggagtagaaggattgttaccagaggttggcaagggtagtggggtggctgacgtggaggtgagtatgcttactgggtcccaaaaagtagaaagaatgagtaagacctactatttgatagcacaataggtgactatagtcaataagaacttaattgtacgttttaaaataacaaaaaagagtataattggattgtttgtaactgaaaggataaatgcttcaaaggaaaacaacaacaaaaaattatctatgaaaatatcgtttctagatgtatttaataagatacagattttgaaaatgcaaacattggcagcaacacccaaggtatatctgggatatctctggatgtttgtatgtacagagaaaaaggagtcctaacagatataaagtaattttaggaaaaaagaaaataaaaccttatcaatcaaagggaatataaccttaccttactggactgctattgtaataaacaactgtgtcgaatgacagtctggaaatttctgttgatcaagacaacatagtagtttagggtcagcaaactatgatctgtagaacaaatcctacctaccatctattttagtaaagtttcattggaagctaattatgcccattcttttatattttgtctatggctatctttcggctacaaaagcatagtcaagtagccgcagcagagattgtattgaacataaaaccaaaaatatttatgatatggtctcttacagaaaaactatggcaatctttggtgttaggtgagtttaacagtcaatctggatggattcaaatcccagctctgatggataacccaagatatttattttatttgttcctcagtttcttcatctttgaaatgaggataaaaataatcctatcaaaaagatagatttactgcaaaaattaaataaactaataatatatataaagtataagaacagtggccagcacatagtaagatataaatgataggatcaagaattaacatgctatttataggagtcctgcaacctgagagagtttcaatgaagctatgagttttcagctatgattctttttctcagtttcaaatttgaaagactgcatggttgtctccatgacacttgggtaagaaaaaactttgggcttagactaaatcatgtagtgtattagagttcataaagaaaaatagaaaaattagatatttcaacatagataatttaatacaagagattggtaaatgagtgtggaaattggaaaagtaaaaagtaaacactattataaatagtaactgctgtttatgttaggtagctgcatcctgccccactacctacctttaccatgttagataaaataaagaaaaacagttgatattataacaacctagtagcttgtagatgaggccatatagagttgagaagcacaagtagccttatgaaaatgctactttggtctctgaaatgggtactacccagctgctactgagaaacctgagggggagtagcaaggctggttttggacataccaataattaaaattaaaaactaaatatggaagacatgtaaatgtttttaaacaataagtagtgtttaccaaatgcaagtcattgttgattatcatttaataattctaagatcatgcatgaaatttcaagaataaaagactcatttctaaaaaagctgaatgtttgagttacacttaaagatacacattagatgttcttgaatgaaacaatatagcagagcccaatttaagagagggtgtcctctattaaagtttgttgtgaagaagtgttatggaaacagattgaacagtggagttggaagggagaagggagatggatgtatggcagtgtttggaaaaaaaactataattttcttcctgctccaaagaagttacaaaaacaaacacatgtttaagaatgaggcaggcttggtacctgtaggatacagctttattttgaaagttttccctctgtcaaaaaaagagaaaaggaaatcagataaatccacaaacttgaagccctatgaaggaaggcaatagactcctaactgtcctcttatatctgtcctctccatgccagctaattcactctcatgtcacatagaccatggcacagtgctacttaaattgtcatggaactttacatactatacacaagacttcaaatcgtttcactttctgttttaacataattacttaaactggccacttgcattttaggtattagtagctcaccttctcctgctttcccataaacaccattctgtttctgtgctcacctagtaccttctgcctggagtgatatctttctctttctttgggtaggttgtctaacttgtctttatattgtaagcctttgtttcagttttccctgaagaacctctctgcatttacctgctgtgctaggtattccttctttatattcccattacaaggtgtgcaaacttcaaacttttcattatagcatatcattgtaattattcttatggatattacactcactagaaataatcaagagtgagactcttgttttatttccatctatgtcccaaaccagatagcacagtgtttgacacataaagggcattcattttgaaagagcaaagagatggtggtcttttactattctcatttgagtttctgaaatgggcagaggtttatatggaggcccccagaagatgctgagtgtcttgctgaaacaacaacaacaacaacaacagcaacaagaaatgcaccactagctacagctcgaaatataccataaagtagggaaaagtagaacataatgagtagggaaacacacttctgccagaagtactgctatagtgtcagttgtcattaaggaaagaaaggtattaggagttaatccatgcttttgcgtaatacttaggttgttgatgataatagttttcttattaacttccttctttttattccttcatgagtatttgggctacaactccttaaacaaccttgaacattacgagtttgctttagttcacttatttagagtactagaaatgacatgctttatagaactgtaaatgttggagcaagtgatctcctagttgaccagggtaattacaactacttccctatgctgcagcttctcccataccagccaacagggaatcacatcatacgaggcaaatttcatcaactcttttatgaaaattacttttctattcattaaaaaatatggtgaaaaacaagctcttctgttgaagactggcatggggaaggtataaagcaaaaagttgatttcagtaattaattacatgtgccagaccgtgtaattcatgtatttacctatattattgcttataatccttgcaacagctcatcgatataaacattatatctcctttgtaaaggtatggaaactaacaaagtttaaattacttaagctagataatcagttatctgtctctgaatgactatcacaaaagttagtggcttaaaacaactattttcctccctcatgattgtatggaatgtttacatccttcacattgtgaaggatgtgtatggatgttcagtcttgtttcttcaccttgtctccctttggccagtcatgtggttattgtcatctggtgggggaggatggtctgagatggcctcacccatatgtctagcagttggtgatgacagtaggtgaggccatttgtttcctacaggcttagagtctccttatgctaaggccagttgaataaagcaagtctcataaccaatcccagagtcaatgagagaggggactatgaaaggacaaggatgcaggcaggcatgagtcattgggagtcattactgtggaaatctacacacctagtaagtggtggaactggcatacaaacttatgttggtctgacttcaaaacgtatcctccctatccttgtggccaggtattcataaattagaaaattcatgcattaaatcaatttgatgtaatgcttaaatcattcaaagtattgttgagtcaaaggatataaaatgcttctatgggtatctgtatgcaagatattcttaataaatagaagttcttattagacattattattcaatattattcaacgtgattttctagcagttatctactacattatttcacaattatctactacactagtttgaaataaaagaatgcaatagagacctcattagttcaaagaatgttttctatgtttctttgttggaatagcagaagttactctaaaactggtagatgctttataagataaatacacgcatgcacacacacacacacacacacacacacacacacacacacacactgtattagtctattctcatgctgctaataaagacatacccaggacggcataatttatgaaggaaagaggtttaattggctcacagttcaacatgacgggagaggcctcaggaaacttacaatcatggtgaaaggggaagcaaacacatccttcttcacatggtggcagccagagaaatgcagagtgaaggacgggggaaagccctttataaaaccatcagatctcacgagaactcatttactatcacgagaacagcatggaggtaacagcccccaagattaaattacctcccactgggtccctctcatgacacgtggggattatgagaactacagttacaagatgagatttgggcgggggacacagccaaactgtatcacacaccccggtatagttcagactgtgctcaatttcgtacaagtttgtttctgatcacacaagatataatgggtaaaagtagttctcctccatctttaatatctgtagctcttggaatttaatataattgcttcaggagttgaaaggaatagagggccctgtggagtggttcaaatggctaagcctagaaaaggtgtacgttactgccaggaacatcccttgggccagaatccagtcatataacccaaatgaaccatattgtgaaggatgacatcaacatttcttgagctatatcagtatctgccacagtatattgaggaatgaaaaagttcaagtttaatcgaaatctgcatatctaaaatttcttaatactaacctgaaatttataatgcaatttatacccccctgttcacataggagtaagcaggcattgttagaagaggcaagatacttctggagaaggtcttgaattggtaaagtattttgagaaagtaaagtatgtcactatttaaaatgttatgctgtatcacaaaaagaatttatttattataccaaaaatgcatactatttttaaagttaaaagttgatgtcgtgactcaaactttctgtttctgttgccaatttatggtttgactgatgaggagggaagatacttgtccatggaaccaatatatttggtcctacagttgtgagcaatctaccaaactcaattctaagattgtggcaaatgaatacattttgaaatgtatcatctcacaggcattttttgggaagttttttgtaaagaatggattttggagcccaataaacctagtgttaattctctctattctaccactgaatgtttcaagggctaaagaaagttgtcatttctggacttcagttttattattattacaatataatggttcacatggcctaattttaaagtgcatgtttatctatcattagggatgttatgttggacaagtcacttcagtaaaatccttcatcagtaaaaccctttgtatgatggtgagaattaaataagaataaaagcacagctaccccttagtcaatctggggagaaaaaagaaaaagaaaagaactgcaaaaagcactttggagagggactggtcattaaatggatagggttctattgctgaatatgctgggaagtttgcctttactacattgagcttagcatctcacaaacacaattatactcttatttagttcacacaaatcaactcattgtaaaatattttagcatcatttaaaagtcaacagggatgaaattttacagtccaaagtaaaaagatgcagtgctgtagctctaagtttgatttatgtgtactttttatatgtctttggtacactttttagatgtctttgagtaggccaatgcttattaactttaataacaacagtaggttcaattcaccagaaaaaaaaaaaaaaaaaactcatcctaattccctgcctacactaccctgtgagttattctctgatccttcatttaatggtaagttttttatttctgtgatgctattctttatcgttttgttattatcatagtgcagaaaaaaattacaactttattggtttatactttatgtacaatacactgtacatatataatgtgtgcaattggaaaacttacgaagccaccaccacagtcaagtcactaaacattttcggctgtgtgcggtggctcatgcctgtgatcccagcattttgggaagttgaggcggtcagatcatgaggtcaagagatcaagaccatcctggccaacatggtgaaactgcgtctctaataaaaatacaaaaagtagctgggcgtggtggctcacacctgtaataccagctactcgggaggctgaggcaggagaatcacttgaacccaggagaaaaaaaaaaacaaaagacactaaacattttcatcacccacagatgtttccttttgctcctttgttattcatccttactctactcacatcacttgatgtcaactagtctcttttgtcattataaattggtttgtactttctagaaatttatataactagaaacaaacaacatgtactctttgtgtctggcttctttcactctgcagaataattttaatatttattcatggtattacatgtctctgtaattatttgtatcactgaatggaatgtataccacaatttattgatacattgatgggcatttggagtttttgttgtttgtggatattaaaaataaaactgttatgacatttttgtataagtcttcatatgaacttatgttcttatttttcttggataaatatagatcatatgtagatgtatgtatagctttttatgaaactgccaagtcattttccaaagtgaatgtaccaacccacattcctaccatctgtgtataagattttcagttactccacatccttgccaataattgatatttcctctctttacaattttagccattttattatctgtgtaatagtattgattgtagttttaatttttctttgatggataataatgttgaggattttatatatactgtgcagcatataatattctcttagcaattgttaaagagagttaaatttagttctacgaagcccttggaaagtgtcagtttccttttaattgctcacagttacttaaatgtgaatgataaaattctgatttatcatatattaaactactgttactgaattttatttaaatgaggttgtagtgatccaaagagctagtgaattcttaagaaacaatgcaccaaaaagaattcagctatgacatatagaagaaatgatcttatattgtaactgttttcagatagttgaaatgttaaacatatattactcaggaaatttgtagaaaaatcggtcataccatttacctacatacatataagtctacaaattacccatcacatacacatatatattacaattctataaatcctaaatttgtatatgtgactcaataggaaagaaaaaaataaatagcatattttagtattttaaagtagtagataatgtggacttttctattcagattttcttgggaatgtggtggtgaggaaaaataaaaatttgggagccttgaaaattttcagggaattaatactgtgctagttaaatcatggttcttggactagtagtcatgtgcaagatatttgaaatacagaattttagcatcttccctaactacagacactggatgagaaaatgctgcttattaagatacagaatttatgtacatgataaatattgagaacccctactgtcaaccacttgcctctcttttctgaatctaagaaggtcatctcatttaagtgttattttctaatcttcagtaattagaaaaaaatataaacggaacctgaatctactatcttatgtgggaggtgatttgtcttctttcctatcaagaaagaccaaacacaggaattactgtgaatagtatatttccaattcatttcatcctggcttcgcttgcctctgcctaactttggagcccagcatttacactttgatgaattagccatgtcacttgcagctttacatccagggctctccccagataccatttcaaattcctgttaattttattttaatcctgaattctgagtttgaatgtatacccagatcagccctgtctttgttttcactcactggtgtggatgtagcatgcctccattaagctttttattaacttgccttgtttttgtctctggcctcgttacctcacagtcctttatgttaaactgctaaagcagggactttatgtctagctcattccatactgaattacctctctctatattgttattcgctttctgtcttcaacacctctcacccctgttttgccctctcagcaattcttgccactttgcagcatgttcctgctttcaggtcattaacatataaagtggaaaaaaattggatttaatattgacccctgtggttctctatttcccagtcttctgactcctaaatattttccatacccaaatggtctttttataacaaataatccaattctccctttgcttaagtgtggtttaaaagggggttgtactctgttatttttaactataaaagcatgatttagacagtctttttgaatttagtgaagtgcaacccataaaagactgtacttggcttttatactggaggagcaggatgcttagctggcaccacttggaacaggcctgtggtaggataaaaagctgtgaactgactttgctccactactacttctgagaacttttgataggcaggctagatctttctaaaatgaccagagaaagtcactactgaagaggtcagaaagatagtttgggtcctccttttccaaaaaataattctcatgtcactatttccaaactaattccaatgttcagactagtcaatttacaaaacttcctgggttgcttttggccttataacaaatgcagcatgtaaatacagtaaataacatgcatgactctgccaccaagattaggaagggaagtgctagagtaaactcccaacagggagaaaataagagctagaatccaaaggctaatttaagatgagttattgaaagcagaaggacctaggtttaaaacttgatttcaacatttcttgacagttgcctattttaccagtgaatttttttatttttatttatttatttatttattttttgagacggagtctcgctctgtcgcccaggctggagtgcagtggcacgatcttggctcactgcaagctccgcctcctgggttcatgccattctcctgcctcagcctgccgagtagctgggactacaggcgtgcgccactatgcccggctaattttttttgtatttttagtagagagccaatgaacttttacagtagaatgaaatattccaattttttatgactttctttgcttttttgtttattcctttagaaattgtacacatataattacatttaattatatatacatattaaaaattaaaacctgtgtttttacacagtatgccagttttgtggaatcaggtattttcttataatctgaaatacatagggacaaaaagcaagtctaggtaatttaggagtcgttttgctttgatctcagaacaatcttaaaatgataaaagaggacaaaaaagagaattcctggtctttaaaatggattcattatggttaatttacataatcagtatagcttgctatcctggacaatatatacttagaaaaaaaatcatagtatgtattcaatttaaacagtaatatatattcatttcaaggaagaacatttttaataaagatggatttgctcatatagaagttccagtactcagtaaatgtttatggagataatgaataaaaaatgtatatgtttccacctgagaaacagaatggcttttataataagcacagatagttagacatggttttcaatttcagttcagccattagaaatcctacgaccttaggcaagttacttatattttctgagcttcagttttctcctctgaaacaaaggggtgaaaatcatatttaaaagaaagtttcatttataggttaaaaaccttagacgtgaaaaactagctagcatagtgcctagctccaacagaaatgagtaagtggtaatagtgtttgttttcacagttagtatcattcattatgatttttgttatatgaaaaaatgttagaacaggaaggatctttaaaaaccatgtagtaccaatacctgattttacaggggcggatattgaggattgatgggagaaagtgaatgtgtggtgagaagagaactggaattcatttctcctaactgcatggttcaggttcctaacactagatccatcataacatgtgaaaggcatgttgccatgaatccatgattcttagcatgggaaaggaaggagatcattatccatgacacatttactggagcagcctatctaggttcaaatcccagttgtacctcttgctagtcccagaagcaagttctttaacctctttatgtctcctggaccacatttctaaaatggggataataacagaaattaactcaaaagtttgttgtgaagactgaataaattcattattttaaaatatttgaaacagtacttcataggtaataaacattcataaacattcattgttatttctcttaaatcccattgcttagcaggcatcttttgtttcttcattttccttcatttcttaataaaatctactgagtctcaactcttcgtaggttcttatgttaagaaaatttacacaaaaagagctcagtcttttctactaaagattttgtaacagaattggagaaacaacttggaaaacaatgatttaagatcctttaaaacactgaatttattttcaggattgatgttttatacattgatacactttcaattcaaagtaaaactttgttcagtaaacagaatagggaataaaatcattctctttaaagacaaagtaaattttcagaaagtattagagagagtaggcatggtgggtagaggctattttagatgaggagactacaggaaaaaggcagactaaggaaagcagcagttgtgaggaatatttttgcaaacagaaagcactacccttatgaatttatcaatagctgctccgttgtagcaaattaattatgaaataattgaccataggtcaatgccactgtaggtgtgaaacatatacatactatttgacgcattcactttcttctttgtgggcagagtgattcccaatttcagaggtgctcagtgacataaaacttgctttacactttttaaaaattaactaagctgaattaaaggatgggttttcagtgggagctgaatgatgagagcacatggacacagggagggtaacaacacacactggggcctgtaagggggtggggtggggggaaggagagcattatgaaaaatagctaatgcatgctgggcttaatacctatttgatgggtggataagggcagcaaaccagcatggcacacatttacctatataacaaacatgcacatcctgcacatgtaccccaaaacttaaaaattaaaatagaaaagaataggttttcagttaaccagttagtcagaatcattagcagtagacttttactaaatcctaacaaaaggcccatatttactagagcacattaaaaatgaaaacaaaaacaaaaaacaaaaaacaaaaaacccaaacacaccagaaccatagaattgagcgcataagtgacaaaaattatgtgaactttcaaaagattctataaattaaatttatgtctacctacatgcatgtgaatatggacacacctatgtatatgtgtgtgtgcatatatgtgtatgtatattacagtaacctttgcaaggacacacatccacataaaacttccatggttttacaatcttgacattttgcctaagggttagttaagatattcactttgtaacctggtttctttattaccttaactccatttagaagaatattccctctcccctctaaatccacaccccatttaaaatatattcacatcaacattttacacactgtagaatattcaagcaaagattcagcccaggaatgctatgcctcacagtaaattgagaataaattatccatacagttcaagcacatcatgtgagcataaaacaaggaagtaaatttatggtaaaaaaggagcaactgtgtgtgccttaatgctaagtacatttgatagtatagtgtgatgtttgattttattggacaggagacaatgcatatattacagaagaatctttcatcagaattttaatatcacacattctacagatgtcaattcataaagtcaaacatttatatcttgagactagaaggcctggcatttagagctatatcatcaaacagaaggctgggacttcatatttgttttcaactttctctctgtaattttctaagcaaaataacaggcataaaatacgtcttcatgaaagtatatgatactttcataaagcttattgacaattttaatgtgttattctactttgtgttatagaaagcccattaaccttagtgacttctctgtcaatatagggaattcaccagaataaaacatagcaataaactaaatgtatttatatgtctgttccctgattagactatagtaactcaaaagcattcattttctctaatgataaaaataacatatgtttttaataaaaatttcaagaagtaagaaatatataaagtaatacaagctttgcattcaaaacaggaattacagtctgtgaaaaatactggtttgaagtttacgattttgaatattatgagttttgaggatctaatacaatactaatcactttcttcagaaacagtaaaggtagttgggtgccatgaccaccattggtacttggtaaagcaataaccatcccttcctaacctcactcctgctaaaaagaaaaaaaaaaaagcacgttttacttcctgacaccaggacagttatctggaccaggaaatttacctgatgctaaatgtttattaccaaaacaaataaatatttttaatatataatttctttatagtttgtggtcctgggtggtttactcagggaatgtagaatttgtctttgatctctatcacatacctgtgacttagcaccatgggcaaattgaaagtgctattatggtggtatcattaaacttgtcctgcagcccaacacatatctcaaggatttttctcacctggtgacaagaagtcattatattttgacatggagagggaggaaacataccaagcactccccagaactgacagtcagtaacaaatgatataatgagcctaagtcacttagtatagatgctagaatagggaagatacccaataaataagagtttctcttcccttctcccattttcttacacattttaagatgtattcctaatagtcctcaaactgtaacatgtatcctgctcatttgaagaagtggttaaagcagcttatgatactgatgatgcggaattttgacctagttgcctgtggcagtagttctcagccatgtcttacactgatagtacactgataccctcaggccaaaaaaaggtccagaatagatgaaagcctccctttaccccttgcatgtctcccaagattgtgtcagaattaagaacagtgcatttattaggttacaaagtacagtgctataatgtggggttttcaaaaatataaaagtacaaactgtaaattgttatagggaattagtcattttgaatttttctccctttgatagcaattaccttttcttgtttctggtatgggaaaataagtctgagatttttttttccatatagaaaaagactgtaccctgggaaggccaggcatgagaaactgatataggcattaggaaaaaatgattttcttcttgaattcatttttcatagcctcctcttttaatcactgaagtggaaaaattcaagaagaaaaggttaggttgctagcttgagggaatgggtctgaggggcctgctaattctactttaaaaaaaacatatttatctgtaaaaggctttcctcttgtgtaaggaaaatgatttcttataacttcataatatccaatcaaattcatcatatacatactaggaagaaaacatgacattgcatggtaattgtattactctgttttcatcctgatgataaagacatacctgagactggggagaaaaagagggttaattggacttacagtttcacatggttggggaaggcctcagaatcatggcaggaggcaaaaggcatttcttacatggcggtcgcaagagaaaatgaggaagaagcaaaatcagaaactcctgataaactcatcagatctcgtgagacttattaactatcacaggaatagcacaggaaagactggcttccatgattccattacctccccctaggtccttcccacaacatgtgtttattttgggagatacaattcagttgagatttgaatggagacacagccaaaccatatcattccgcccctggcccctccacatctcatgtcctcacatttcaaaaccagtcatgccttcccaacagtcccaaaagtctaactcatttcataattaatccaaaatccacagtctaaagtctcatctgagacaaggcaagtccctcctgcctatcagcctgtaaaataaaggaaaacaaactagttacttcctagatacaatgggattgcaggtattagggaaatacagcctttccaaatgggagaaattggccaaaacaaaggggtgatagggaccgtgcaagtccaaaatccagcagagcagtcaaattttaaagctccaaaatgatctactttgactccaggtctcaaatccaggtcatgctgatggaacaggtgtgttcccatggtcttgggcagctctgcttctgtagctttgcagggtacagcctccctctcagctgctttcatgggctggcattgaatgtctagggcttttccaggtgaacagtgtaagttgtcagtggatctttcattctggggtctggaggatggagcccctcttctcacaactccactaggcagtgtcccagtagggactctgtgtggaggctccaaccccacatttcccttccacactgccctagtagaggttctccatgagggccccatccctgaggcaaacttctatctgggcatccaggcatttccatacatcttctgaaatctagggagaggttcccaaacctcagttgttgacttctgtgcacccacaggctcagtaccacgtggaaggtgccaaggcttgaagcttctacgctctgaagccacagcccaagctgtatgttggcctctcagccacaggtagagcagctgggacacacgacaccaagtccctaggctgcacatagttcagggaccctgggcctggcccatgaaatcactttttcctcctgggcctctgggcttgtgatgggaggggcttccatgaaggtctctgacatggcctggagacattttccccatggtcttggggattaacattaggctccttgctacttacgcaaattagtgcagttggcttaaatttcttgtcaagaaatgggtttttcttttctactgcatcatcaggttgcaagttttccaaacttttattctctgtttcccttttaatatggaacgctttcaacagtacccaagtcacctattgaatgctttcctgcttagaaatttcttccaccagatacctgaaatcattcgtctcaagttcaaagttccacagatctctatggcaggggcaaaatgctgccagtctttttgctaaaacattatgagagtcacttttgctccagttcccaacaagttcctcatctccatctgagaccacctcagcctggaccttattgttcatgtcactatcagcaatgttgtcaaagccattcaacaaatctctagtaggttccaaatttccaacatttttctgtcgtcttctgagccctccaaactgttctaacctctgcgtcttggccagttccaaagtcacttccacattttcgggtgtcttttcagcaacaccccactctactggtaccaatttactgtattagtccattttcatgctgctgataaagacatacctgagactgggaagagaagaaggcttaattggacttacagttccacattgctggggaagacttcagaatcatggtaggaggtgaaaggcacttcttacatggcggtggcaagagaaaatgaggaagcaaaagtggaaacccctgataaacccatcagatctcatgagacttattcactatcatgagaatagcacaggaaagactggcccccatgattcaactgcctccccctaggtccctcccacaacctgtgagaattctgggagatacaattcagttgagatttgaatgtggacacagctgaaccatatcagtaatgttgtttgtgtaattagtatttcaagggtaggtccaagaagagttaagtcctgggtgtggagattctaactctttgcaacaattaataaaattgcacagaagttgttccttggtgcaacgtgttttcatgttggttattctaagcttcttgcttagcaggtttgaagatgaataggtgagggagtactggtgggagcatgtgctatgctctccatagttattttgcttgggtctgcagtaagagctcacttaagcagattctcctatgcatctagaatttccccatatcttgaccaattttataatttgttgagctatttgaaagaataaattcattttaaataattaaaaacatattgtgaattttttactacaaaacttctgcatattcattgaaagaaacaaaatattcagattaaaaaaataagaaaaaacacctttgcttctgtcacctagtgtttttttttctaggagtatgaactgtgaatttttactttttattttttgttttaataaatgaggaacaagtgtgtctatttatgttcatgctgtggtgaatgtgaacctatcagataatttatcagtatttggacatgattcataatgagtagtctttatcaagtcacattaaatgaagaggctgtgacgttgaaacttaagtgataatttaatgatagaatcagattctgtgaactgtgtaaaataacagagtttaatttgaggaatcatgtcttaaaaatacatcatgatagaaaagccaaaaatacacacttaagacaaatgaagtataaaacacaagttaatctttcaaacttcagagacagtttaacaaccaaaacaattacttaaacacttatatttggcctgaaatattgttaaaatttgaaatagaacttacatatagtgaactacatagaaattaagggtattgtctcatcagtttcacaaacacatgcactatttatcctgtactaatacaatctggaataaaataattccatcattatttatgccttctgacaatccttttcccccatttttgaagtaaacacttatctcagttctatcaccaaaaatttgttttccgtattctaaaagtcatataaatgaaaattattttgtgtgtatataatttaattcagaatgatgtttttgagattcccccttgctagatgtgtataaacaattatttcctttcctttttattactgactactgttgtgtggttaattattctcttgttgctggactgatggcaactttttcagtctttggcacttatagataaagctgctttggacatttgcttccaagcttttgtgaacgtattttcctttatctggttaaatatctaggaatggaatttctgggtcatgcagaggatgcatgtacactttttttttaaagaaactaccaaacagttttcctactgttgtaccattttgagcttttatcagaacagtgttctgggtgttccacaaccttcccaacattcggcatcctcaacatttttttgattgtggctattacaatgaatgtgtagtagtatctccctgtggttttaatttccattacccttatggctaatgattatcaatacctttttcatttttactgaagagaaatattccaatacatatatatgacaacttgtaaatctgtttctctggatttgggttctatctaaagaaatgagtatttgggtttttttagagctattgtgaacattcatgtataattcctttttgtacacatatacttttgtttatcttgagtgaaagggagtagaattacttgatcatatggtagatccttttatctatttattgtagccattataaatattcttactaataatttaaatatatgggccatttctgaatttggttctattgattgtttagtggttgtgggtcacattttcttacttttataaatacttcataatctatgattgaatgccagtcattgtctataaaagacggtagagactattgtaaatattatttataccctaaaaagaatataccccttcttctggcaagaagtgaatgtacagagatgtttcaatgtagtctgtgattgaatggggcttaggatgtattgatccttatggtatattcactgcaggttccacgttaattgaggataggctcaaaattttctctttaacaaggcttaatctgtgatctgccctgatgtcagacatcagcccacccaattcactggtgcctcaagggtgtttctcccaggtttgtcactccatctttagccatagatgcctactgcttggtacttgatataagttctaaacactagtgccatttctcttagttctctttttctgccctcagacatcagcaggtcctgagtatctgcacctctggaggtctcctttaagtttcctgcccatcccatctccattgtctggtcttcagtgtgaatgctgaggttcttgtgggtttctatcagttctctccccaattctcagatttccactgacccaactccttcatgcccaagaatagctaatagttattatcttaaaaaattaaaaattggtaataaattggtagaaaacagttaaataaattatggtacattgattatagagataacagctctaaaacaaaataagaattattattattaaaatggaaagaaatttgtaatatattgtcaagtaataaagccggattgctaagcaatatgtaatatgtatacataaaacatatagacatgtgtacacatgtgtgtaattgcgtgtgtgtgtgtgtataatatatgaaatacacaaagagaagggtctgagtcaacaggtaataagccgtcacctagattaccttaaggaaaggacagacgtcagggatgaatcaggtgaaagtagttcttgtttatagtatgtgttctccagtattagcaattttataagaaattagagtaattagattagttgtgtcatttcaaagatgaatgaaaatatgatggagaaaaattacatttgatgaatattaatatggctaaatggaactacataagcttcaaatgagtgggaacaattataaacaaagccatacttgaatttttattcataaaagttatgctaaaaaataaaacaaaaagcaagaaggacatagtcgggctgatttgaacaggtggtgtaatgttaaatgtaggtgggaatacacagttatttagctccccatttgcttctgactttactgtcaaggagaataattatcttattaagagggtaaaataaacatttggaataaagaaacttaaactgaaacttagaagaaatgataagacagcaccttgttgcattaaaagagtttgtcaactgttctgggcacactaaatcacaaggaatccaaagaatgtgaaatgatcactaaaattgaagaggtgttttaagactacaatggtaagattcaaacatttaaaaaataaaaaataaggagctcaaacatgtaaaatatggataaaagatagagcccatgggtatggaaaatgaatttggggtatgtaaaatgaactggacttaatagggagcagagttttaaaatctatcattatgactggttctttaaaatttaaatataagtcaatcagtagaaaccaggatggttcactaagctaaatataacaaccttctaaaaattgtacacagtatgacagctcatttcattatgaaggataggacttgtagtgataaaagtttgtttgaattaaacttaatagatttaaaatataaagatccacttaatcccaacagaattgaataagtaatgcttggatgacacaacagatcagactgtgtgttgaacactttttaaaagataggataaaacagaaaaatgactaaacttcattgattgtagtcaaacccaagtactggagacagcaaagcactaaataacaatttcaaaaatataaatgtaatttccttgataacaaacttgatagactgagaaatcctctaaaatataaattatctgtgtacagttcatctaatataatattattttatactagaagttaataaaagtcctgaagtttagccttgtgtttcacttaaatattccattagaaagaagatttcaataccaaagtaatagataggcatgtaaaactttgatatagatttttgagctgttacttagagataaatatatgagacaaagacctatcaggagcagtcatttcaatgattatctttactctcttactggaatattcaaataagattacatgatccatacctgtaacattctagaaaaaaaatgcactgttgtgatttgctaacaccagtagtgatcagataccagcaatataaacttttgaaaatttgtgtctcttgcattaaaaacaaacaaaaattgtcatcttgacccagaacacctccttttgagtgtaagtccttcatcaaccagctgagtaacctttgggaagtgtatgcttttttctttctttctttctctttcttttcttttcttttcctttctttctttctttctttctttctttctttctttctttctttctttctttcttttctttcttttctttctttctttctttctttctttctttctttctctttctttctttctttctttctttctctttctttctttctctgtctctctttcttccttcctttccttttctttctattctttctttctttttttttgtgtgtagtcttattgtattcttgttgctctgctaagcgtcaaggaaattaatttgtgtttaaattcctggagcatgaaataaactcagtaaatgattgatttttcccccatttcttctctttcttctgtccttctcttcttccattgtaagaaaataaagagatggctattgtggtaggcaacccttaagattgtctccagtgatcccgcactccaggtattcatgcctttatgtaatctttgtgctaagaatttgaatggtccgagatttttaccctacttgcaagttagcttgtcacagtgtcatggattcttggagatgacatgagactccaatgtcagagacaaagcacagtttcttacttacggtaagagcattaggcagagcatttttgcacttacttcctaagatccatttttttccagggaagtacctgcacacacaatagattttgttaaaggagaggaacgccaacctcaagacaattagatcttttaaaaattggcagtaagcctgctgaaactttgaccctgagggtaacatcatttttattagattagacagtgaacacacctatcctttgctctagagagagacactatctctgtcttccaaggctgtttgctatataaacatatttgaaatgatcacctagaacaaacagaaatgtgagaattgtatactagctcccttctccttgaatgtggatgaactcgttcattctcttctaacaaatagcataaagcagcaatgctgggatttcacttgcaagagtagcttatacaaaaacttaaggcttctgtcctcagtgttctcacttctctctcactctcctacgtcactcagcgtaagagaagctgtctgccatgccttaaggaaaccctgtggacagctaaacatggcaaggactaaaaactacatgagtgagcttggaggtggatccctcagcaactgagcatttagatgagactgtagcactgactacagcttgttagacttttacacagaggcacccatttaagttatactcagcttcctaacacatagaagctatgagataataaattgttttaagccattaaaaatcaggttaatttgttgtagagcaatagataactaaaacagataacattattattaactgtgtagtttgtaatgaacaaataatttttacattggttgaatttcgacaagcattaaatgaatttaaaatatttaggaagaagcgtttaatggagttggagaacgagtagacatttacatattccagaaagacagaatgcttgaaacttcctatttaggtatccttggcctctctacctctttctatattttttctactggcaaataagtatccttcactcaaaaagcactattatcatttcctttgtaagtcttttctgtcaccctcaaagcaaatttaggtgtttctccccatgagtttcatttgcttagtatacaattcatcgtatctgtagcaacatttaatttggctttgaaattatttgtcttatgtttagattgaaaacaatttaaaagtaataatataattgttttacttcaatactactatgatttaacaccgggtaagccatattaacaggcttacctttacaataccattttcatattttaccaaggccttcagtgcttgtattcctaaaaaaaaaaaaaaaggccaagtgccagtggcttatgcctgtaatcccagcactttgggaggccaaggtgggtggatcatgaggtcaagagatagagaccatcttagccaacaccgtgaaaccccgtctctactaaaaatacaaaaattagctgggcgtggtggcgtgcgcctgtagtcccagctactcgggaggctgaggcgggagaattgcttgaacccgggaggcggaggttgcagtgagctgagattgcaccactgcactccagcctgggcaacagtgagagactcttgtctcaaaaaaaaaaaaaaaaatgttaacagtgacaaactttgtccctgtaggcaagctggttgatgagatgccaacatgtgtttagtaaatcatattgtgtaagtgttctaaataatttatgcttataaaatacaaaatcttatataggtcaatattctttgcaacttatttctacagttaatctttataacaagtgcagaggtaagatgggaaaacattattctctaaatgtatttttgtttttgcttttattctgacatcaactcatatatgactgtttttgagaatgtggagctcagtaaatattaaagaagcaattaaaatgtcaaataattgcatctaagacaaagtgctggaatatgtctttccatcttttatatgcatgttctttttctctttttttaatttttaatttgtgtgggtatatagtaggtatatatatttatgggttacatgagatattttgatacatatatacaatgtgtaataatcacctcagggtaaatggggtattcatcacctcaatcatttatctttttttgtgttacaaacaatccaattatactcttttagttattttaaaatgtacaatattatttactgtagtcaccctgttgtgctatcaaatactaaatcttactcattctatctcagtatatatttgtaccgattaaccattcccacttccccttctcacaccactaccaccgactgtgcttcccaagctttggtgaccattattccactgtctatctccatgagttcagttttaattttcttagctcccacaaataagtaagaatgtgcaaagtttgtctttcgcaaattttatttaacatcatgaccgtaagttccaccagtttgcaaatgacaggatctcattctttttcatggctaaattatacaccattgtgtaggtatgtgccacatgttctatctgttcatctgttgatggacacttaggttgcttccaaatctcggctattgtgaataggactgcaataaacatgggagtgcagaaatctctttgatatactgatttcctttcttttgggtgtatacccagcagtgggattgctggatcataaggtagttctttagttttttgaggaactgccaaacttctccatagtgattgtactaatttacattccctccaacagtgtatgaaaattctcttctcttcacatcctcaccagcattagttattacctgtcatttggataacagctattttcactggggtaagatgatatctcattgtagttttgatatgcatttctctgatgaccaatgacattgagcattttttcatatatctgtttaccatctgtatgtcttcttttgagaaatagctattcagatcttttgcacattttaaaatcagattactagatttttttcctatgagttgtttgaatttattatatattttggttatcaattccctatcagattgatagtttacaaatattttctcccattctgtgggttgtctcttcacttagctgatttttttttttcctgggcagaagctttttaatgttatgtgattccatttgtccatttatgctctagttgcctgcacttatggggtatcactcaagaaatctttgcccagtcaaatgtcctagacagtatccccaatattttcttttagaattttcatagttttaggtcttagatttaaatcaaagatactttgatttgatttttgtatatggcaaaagatagagatctggtttcatttttcagcatacagatatccagttttcccagcacaatttattggcaagactgttcttttttccaatgtatgtttttggcacctttcttcaaaaatgaattcactgtaggttgtgtggatttgtttctgggagccatatttcattccatttgtctatgtgtcggtttttatgtcagttacatgctgttttggttactatagaagtattatttaaatttggataacgtgattaccaatttgtgttttttgttcaagatggctttggctattctgggtcttttgtggttctttataaactttagaattatttttctcattactgtgaagaatgcaaatggtgttttgataggggttacattgaatctgtagattgcataaaattttagcaatactgattcttccaattcatgaacctaaaatatctttcaatttttagaaatactttagcaatattgattcttccaattcatgaacatgaaatatattttaatttgtcatatccttttcaatttctggcatcaatattttgtagttttcgttgtagaaatctttcacttatttggttaagtttatttgtaagtaattttattctattcatagctactgtaaatggaattagtttcttgatttctttttcagattgttcactgctcgcatgtagaaatgctactaatttttgtatgttgactttgtatcctgcaaataaactgaatttatcagttctaatagttttttcatgaagactttagggttttccaaatataagatcttatcatctacaaagaaagataatttttcttcatttccaatctggatgtcctttagttatttctcttgtctgagtgctatagttacgaccttcagtacagtgttgaataacagtgctgaaagtagttatccttgctccagatcatagaggacagcttttcagtttttcctgaaaactgtgttgaggtatgttccttctataaccaatttattgagggatttcatcatgaagtcatgttgaatgttatcagtgctttttcaacataaattgaaatgatcataagattttgtccttcattctgttggtatgatgtatcacattaattgatttgcatatgtcaaaccacacttgcattcctggaataaaccttacttggtgaagatgaatggtttcttaaagtattgttgaagttggtttggtttgaggatttttgcaacagtgttaatcagggatattggcctgtagcattctttattttatgtatctttgactggttttggtatctactggccatgtagaatgagtttcgcagtatatcctccatctctgtgtttcagaatggtttgcgtaggattgatatttgttctttaaatgtttggtaaagttcagcagtgaagtcattgggtcctcgggttttatttgctgggaagctttttttttttttttttttttttccagcttcaatctcattacttcctagtggtctgttcagggtttggatttcctcatggttcaatctgtctgaatgtcctgttcagtgcagaaagtggagtatagaagtcctcagttattattgtattggagtatagctctctctttagcactaaaaatatttgctttttatatctgggaggtccagtattgggtgcatatatgtttacaattattatgtcctcttactgagttgactctttatataatgaccttctttgttgctttttatggtttttgtcttaaaatctattttgtctataataaagtatagctactcctgcactttattagtttccatttgcatggcatccatttattttcagtctatatatgtccttatgggtgaagtgtgtttcttgtaggtaacagatcattgagtctttttttgtaattcactcaacaaccactctctgtcttttgattggagagtttagttcatttacattcagccttattattgataagtaaggacttactgttgccattttgttatttgttttctggtcataatgtagtcttctcctcctttctgtcttccttttcgtgaagttgatttttttctggtggtctgctttaatttattgtgtgtgtgtgtgtgtgtgtgttttactttttgtgtatctcttgtaggttttttcatctgaggttaccatgagacttataatacaagtaaaatcttatatctcaatgccagcactttgggagacagaggtgggcagatcacctgacgtcaggggttcgagaccagcctgaccaacgtggagaaaccccgtctgtactaaaaatacaaaattagctgggcatggtggtgcatgcctgtaatcccagctacttgggaggctgaggcagaagaatcgcttgaacctgggaggcagaggttgcggtgagccaagattgcaccattacactccagcctgggcaacaagagtgaaactccgtttcaaacaaaacaaaacaaaacaaaacaaccaaaaaaaaccttctatctcattattttaaacggataacaacttaacagtgactgcaaaaacaaagagaaaattaatcaaaattctgcactttcacttaattgcaatgctttttaactgtttgttgtttctattgatgtcttatactgtctatatcttgaaaagttgttttagttattatttttgatagattgatcttctagtttttctactcaaggtatgaagaatttacacaccaaaattacaatgttataatattctgtgggatttttgtctgtgtgtacttactattaccagtaattttgtaccttcatattatatctcattttatatgaacgtccttttctttcagtctgaagaaccccgtataccatttcttgtaggacagatttgaagttgaggaaatccctcagcttttgtttatctgggaaaatctatacctcaccttcacgtttgaagcatgtttttgctggatagactattctaggataaaaggttttgccccttcaggactttaaatatgtcatgccactctcttggcctgtaaggtttccgttgagaagtgtgcttccagatgtattgtagctcatttgtctgttattcctttattttcttttgctgcttttaggatcctttctttatccttgatctttggaatgtgattattaaattccttgaggtggtcttacttgggttaaatctgcttggtggtctgtaaccttcttgtctttaaatattgatatcgatctctaggtataggaaattctctgtcataacatttgaataatttttttaccctgatctctagctcctcttaaaggccaataacacttagatttccctttttcaggactatacaatgctatacaactctagttgttgataggactatacaacattacacaacactactcaactctagttgtataggtgtgcttaattgttttaattctttttttgtctcctctcactttgtatatttaaatagcctgtcttcaaactcactagttatttcttccactcgatcatgtctgctaagagactctgatacattcttcattttgtcaatagcattttcagctccagaatttctgcttaattctgtttatttcaatctccttattaaaactgtgtgatagaattctgaatttcttctttgtgttatcttaaatttctttgagcttcctcaaaacagctattttgaattacctccctgaaaagtcacatatctctgtttctccaggattggtcccttataccttatttagttcattttgagaggtcgtatttccccggattgtcttaatacttattgatgttcttctgtgtctgggtattgaagaattgggtatttattgtagttataaatgtctgtgcttgtttgtactcatccttcttgggaagactttccatgtattcaaaggaacttaggtgttgtgacctaagtctttggccattggcactgtatcacctttagatggcactccaaccccagtaatgctgtggctcttgcagactcacagacgtattgccttaagtggtcttggataagatccagaatttcctggattatcaggcagagtcttgttctcttccctttctttccgtcaaacaaatgaagtctctctctctgtgctgagctgcctggaggtgggggaaggatgacacaagcacccccgtggccaccaccactggtgttgttctgggtcagagctaaagccagctcatcatttggtctctcccaaggctcacagtgaacactgccagctaccacctatgttcacttaaggcacaaggggcctacaatcagcaggtggcaaatccaggcaggtttatgtctttccctttaggatggtgagtttcctctggtcccaagtgtgtctagagacactatccaaaagccagggcctagaattgggaactttaggaatctacctggtgctttattctactgtagcagaactggcacaaaagccacaagacaaagtccttcccactcttatctcctatttattcaaacaatgaggtttctccccatggtcactacagcccctagcccaatgtaaataatggttggctaccaccaatgtttactcaaggcccatgggctcttcagtcagcttgtggtacatgctaccattcctgaatctctccctgaagggtagtagactctcttctggccaagggcaggtcacaaaatttcatgcaggaaccaaagcctggaattgaggactccaagagcgtgcttggtgctctaccccactgtggctgaactgatagtcaagctgagttttggttcttatgaagacgctttttgtgtgaatttttattcaatttggtgttcctgtggggggtgggtgggcactcactggaggatttttcagtcatcttgctctgccctgtctccattttctcttttttcacttaaaatcatttgtatcttacatttttaattcctggacaataagccatatttatttgatatgatttattcaataattctaattttgaactgtcacattatttccaacattttttatttatataaaattatgcaacaaacattatagtgcataaatattattgtcagtttatgaatatccccttaagatagattccacaaaatgatacattatgtgaaatggtatgaatattttatgtagtattttggaaaggctagaaaacatagcatccctaccagtgttttatttttatctacatgcaatcaatttccataatataatttggctaggctttgctgatatcatagttaaaatttaatcttattgttttaatttgcattttgttgattaccagtgaagctgaaattttcatatatatatatatataaatttgcatttcctctgtggtttctttacctatttgactacagagtgatagaattttctaatgtctcagtaaatctttctaaataaagaggactaagcacttttgatattttttgaaaaacaattttcctggcatgtatatatttttaataaaaatatacaaattttatgtagctaaagccattttggaccttttatcaggtctttcttggactaacattactttccttttcaataaactgaaaaagcagaatggaagtactcaaattagacattagcaagattggatatcaaccgagtctgtgataaaaaccaagtctataaatattttaatttataacatataattgcatatttatttgcaaaacttttgtactagagttaatatctttgctttgagtctgagtccactgtttggggttccctattgtccttcttgcataaatcacacccaaaatgtatcctttttaatttgcacacttgccttcttgatagagggaaaggaatctaatgaatattgtgaagtaatcaagtatagatttctaagcctttaaaatatgtatcttagtattttatattgtcgtttttaaaagtttcatttagttacttttttgtataagtcactgaattatatatataaaataattctcttttgcactcatatttcattttattaaacaaaactcatatacacagatgtaagaataaacccaaactgactcttgacaaacatacaacttcactgacagaaaagaaaatttagttctaaagactattctgccaatcgtaagaattcagtaaacctatttcataggaattaagtaaaagatgtcctgaaaatattaatgtaagttttccttcaatagttattatattacacatgactctcccattgctcagaattttaagtttgacattgtaaagtaatgatgtaaagtattatattatattataatctctaatcgatcatcacctctttgttctctatcttcaaaatatttttagcatgtgaacattttatctcgccctcactgtgacaatccctcaatgatacaagccaccatcatcttttccctggattattgcgacagccttctaactaatctccccatttctactcttgccctctatttttccatcaagaaataagacatcattgttaaacatgtcgaaacacagctttcctctgttcaaaaccatatcatatatctgagtaaatttctctaagtccctacattattttccatcctatccacctctctgccctaccaaacatgtctcttacccacctctttttcacttgttcttttccagatgcaccagtatctatttattgctcaagttctcaagtgtgagctgacctttaagtctgttttattgttttgtctgattgaaatgcttttccccagatattgctaggtatgtttacttatttttttaggttatcatttaaggcaggataaataacccccatcatccccacggaaatatccaatactaatccccagaacttgcatataatttctatggtaaaagtggctctgccacttttatcaaggtaagctcagtggtaatgacaaggttcttattagagggagacaggaaagtcacataaggctatgtgactactgaagcagaccgatagggagactgcaagatgccattgttggctttggaaaatgaaggttgggtctgcaagcaaagggatgcaggtggcctttagaaggtagaaaagataaggaagcggattttcccctagaacctgctgaccgttttggaacttctgatcatctgagaaactggaaaataatgcacttgtgttttctaaagctatacattttgtgttaatttgttacagcaccagtaggaaactaacatactgttaaatgtgactgcagcaaagaggttcttaatactctatatgagcgcattcctcaccactccacgtagcactaactatccactctataactcattttatttttcttcagaggagtgattccaccacatgttctagaaatactttttgtttattgcctattttactctaaaagcagggccctttattgaaaatcttttcttgctttattatcagcattaacactgggtctggttaatagtagatactcattgaatattgggtgaatataatttccagaacagttttataggtgaataaacttcaattcaaggagttttataaatgtatacaaatgacttaaccaaaacttgagtccttggtctttttatttgaagattggttttctttcactatataaaagctacctcacctcataatctatagctagtaaaatctgagcaatcatacaaaaatggtatatttctatatgaaactattcaagaaaatatattttgttcagccactgccccagtaagttcaagttcatctttcttcagtttccagaaggatttaaagggaagaaaaaaacattatctgcagtactatactgtgacagtgactatggatgttctcatcaaatgccaccatggcctttacaggcaattaactgaaatggggaatttctgttcaacataggatagagacatggtgctggagattaaatgcctgtatctgcagtacattctggcatgacttggtggaattattatagaagtagccctggataatcaaaggaaggtcacagcacatcagcctgaatatccttcctgacacaccatcatcagtcataagtgaatgatctcccattcaagagaagcctcactcccatacaagttagattagatttataccacaatatactggacagagaggaagaataagtgaacaaaagagaagtagaaattagccaagaaagatgcatggtagaaaatattgtcagagagcagtgaaattaaaaagcacttggtgaaaatatagtttaaggaggtgggatcataatttctaaaagttctgaaagaataaaatggaatgacaaaaactttcccattgttgcaagcaaagaaaacattaaatttatctacagagcagacttggagtagaggaccaaagactatgatgctttgggaaaatgtacattaaggtgtctgtttaccaagagttagctgtatctattccaaatccatatacgccagttttacttaataagcagtttggtttagcggaaagatttagtgacaatttaaactgggttaaaactcaaatccttagctataggatctgaattgtttgtttgttttgtaacctctataatagatgtatgactgcatgctccaaagtgttgctaaagtaattaaatgagataaaatatacctggcacaattttctgtatctagaagatgatcattattggttgtttcattgaggataccaacaggaaactcagaattcactcaatgcagaggatgaagaaagctcaatgaagagagaataataaaaaatggagaagcattgccaattgccatctttcaattgaaaaaggaagagttgtaggcatgtgaaatccactattctgaaggaactgggctttagctgaggaaacacagcaactgctaactgcagcatgtcaggaaggaaacaggcaaatgaatatccaatcttgctagacccctgaccttggactttcagcctccgaaactgtcagaaataaattttcattgtttatttaaaaaatctacaacttgtctatatcgttagcctatatttctattagagagtttgtcactttcttttttcttttctttttttttttgagacagtgtctcgctcttgtcccccaggctggagtgcaatggcagagtcttggctcactgcaacctctgtcttccgggttcaagtgattctcttgcctcagcctcctgagtagctggaaggctactttcttgctggtgtgatgaaatgctaatccttcagagattatatacaacactccttccttatttgcatttttaattatattgtcttttgttgaagacaagctttgtttttatttagtctaatttacctcttttcctttgtgtcgatgtttttcttcttcaagaaaacttgttctatcttacaaacacattacttatggtttcatttttggtttctctattctgtttcattgcctttttctatagtcatatcacatagtttaaattaatatagtgttatagtaaatgtggctatcacaagattaaaaaaactcccttttttattttattttttcaatatggccttagctttactcttccacacatatttttataatcattttgaatagcactctccaacaattttaggcattttaaatgaacattcctaaaacctgtagattaatttacagagaaattatataatacatccctgtaatattgaacaatcccaaacgtgaagttggcatggttctctattatgtcctcttctatacctctttttaaaaaaatgcagtttgataattcgctctacagaattttacatatatttgcttagttttagtcctaatatattaagaatgaagaattgatttctggttgagataaatgctatttattttagatactgctcttgtatctagcaaccttcctgttacaatacttgaaaacttaagtgaacaaagacaactccaaaaaagaaaagtataggttaattttgctaataaatatgaacacaacaatgttatgcacgattaaaatccaagagtatgttaaaataaataatagcacataaattggataaaggaagatagtttaatattagtacatctcttagtgcaacacattatattaacaaagtacaaaacctgatcctagatgtgatttcttcctttatctctttagtactttgaatgtaagaaaaaaattagattaagcttttacactattaatcttttaacattctttctttatttctcatttattgatagcttaaaatgtgtttgatttgtgatttttgtctcagagaagttctaaattatttttagaggaataattactacctgtataaagactacggacacctgcagctctcatctagctggtcttcatgaggattttctgtatctagcaaaaggggcaatcagttaactttcatgatatgaatttctagtgaacctgatataacatcatccatactttgtcacaacttgtacctccttgggagacccttctatattatttgtcttaactgagagtgagaagaggaaatcaggaatatttgcttaatcctcaaacctcactggatcctttcaacattctaacactaaaatatttacttcagaataaaaaagttttttaaaaagatctagtacgttcactcccattttatacactagacactctgctaattactgtatacatgatctcacttaacattcacttaaaatcgaagggtatgaatgtcaaatggttttaagggtaataaagaccagaaagattgagtggttattacatagtcaaagtcactcagcttttggatgaagctgagaatgacagtcatgtctgtctgatttcaaagttcagattcattcaactacataattcatttcagatataagagaaatattgatagcaaaattctattcaataatgatatcaagataattcttgtttatattaagggctatataaacctagatactcgatcatatttgttgaattaaagaatgttgaggcatatttcaccagttgacttggtactaatttatagaccaaagcagaaacaattaaattttactccatttaaaatgtgaaattctactagatgcctatagtatcaacacaatattgaaaaacatattcaataatgccacataagctacaggaaattcctaagtgttcttggttattgtttagggcctcaggaggaaaggattttttctccaaggtatttcctatgcctgttattgtagattgttaatcataactgcagtaatacagacacagagtcaactagacaaagagtcagcactaacatctcccagccagtcccataagtgacaaaatcaggaagttgtatattttgaaatatatgatagagaaacaaattcatagtgaggaatacaattgggcatctacacatgcacagccaaaaactatgtgtagttattaatgtgtcttgtgagaaagtaaaatcccatgtcatgataccatgggagaagataccatcgagtacatacaacatgaacagaatgtttagaaggagggaattctagatgagaattaaagtctatccctgtgtcttcctgggtttaatttgctttcttaataattagtataggtgaacatttttgtgtttgttgtctttggatattgccttttctaaaatatcacgtacaattttttacatttaatctttttatttgaaattatgaatacgtagttgtgcatatttatggagcgcatgtgatatttggatacaagcttacaatgtgtaatgatcaaatcagtaaaattggagtatctgtcacctcaagcatttatcatttctttacgttatgaacattccaattacatgctttaaaaaaatgattcatataaatttaggtgtataagtgcagttttgttcatggatatattgcatagtggtgaagtgtgtggttttagtgtaaccctaaccaaacattgtacattgtacctgttaagtaatttctcctcccttaccctccctttcctggctgcctccaagtctccaagtatccaatgcctattattctacactgtatcactctatgtctatgtgtacattattcagttccaacttacaagtaagaacatgtggtatttaactttgattttctgagctacttcacttaagttaatgacctccagtctgtaattttctgtgttacttcgcttaagagtgtgcctcgaattccatgcatgttactgcagaagaccagatttcatttttttttacgacattccttttaatggctgtattacaccacaatggaatattactcagccataaaaataatgtgatagatacagagatacatatatatataaattagtacatatatcctagctatatgtatatggatgactacatgaagaaaatgggagatagagatatatatatctaaatctagatatatatatgtgatatatatatagatatgtctatctagatacagatatacatatatcaatatctagatatagatatatgtatctgtatctatctacagacatatatcacattttctttatgcagtcatcctttgataagcacttagtttgattttatatctttgctattgtgaatagtgctgctataaacatatgaatgcaggtatccattttatgtaatgatttcctttattttgggtagatattcagttgtggaattgctggattgaatggtagctttatttttagttcttcgagaaatctccatgctgttttctattgatatttcactaatttacattcccaccaacaaactatgtgcattcccttttctccttaccttgccaacatgtttttttaactttataataatagccattctgactgtgtaagatggtatctcgttgttttattttcatttttctgattagtgaggttgaatattttttcatatttttattggccatttgtatgtcttcttttgaaaaatgtctgttcaaatcctttgcccagtttttaatggtcttgtatttttgttgttgaattgtgtgagtttcttgtagaatctggatattagtcccttgtggcatgcatagtttgcagttatttttttccattctaaaagctgtctgttcattcttctgatagttcctttgtgcaagatctttccagtttaattaaattttgtttgtctatttttgtttttgttatttgtgcttttgaagtcttagtcatgaattctttgcctaggccaatgcccagaggagtttttcttagatattcttctagtatacagtttcatgtcttgttaacccaccttgagtttattcttgtatatggtgagaaatataggtccagcttcattcttctgcatatggcaatccaattttttcatgtcgatttattgaatagggtgtcctttccccagtgtgtgttttgtcagctttgacaaatataggttgactgtaaccatgtggctttatttctgagttctttattctgatccattgatctatgtgtctgtttttataccagtaccatgctgttttggttactatagtcttgtagtataatttaaagtcaggtaatgtgatacctctagctttgttcatttttctcaggattgcttccactcttaattattttgaaatatacattatttttaagtagagttgtcccgttgtgctactgaacactacatcttattctctctctcaaattgtatgtttgtgcctgttatctaccctttttatcctctctcctcacttttgccttcttttgtattgacttgtatattttaaaacttaagttgaaggagttattactatattctggatattttactttatacatgatgttaatttttctacccaccttatcatttgcttttatagtgtttaatgtgtttttaatagacaggggtctgaattttcatgcagtattatttatcaagtatttttaatgggtagtactattgtatagtagatcataaagatgctttccagttttttccccagaatattactctgtatgtcatatatgtgatatgtgtgtgtgtgtgtgtgtgtgcgcttaactttttatacttaatattatggtccattcacaattgatttttgtttatagaatgacttttacttacagaatgatttttatttacagaatgtcgtgagtcattcttttcccattggaatatccaagtaacccagaaacttgattgaaaagatgactcataaattatcacattggagattcatttttctcatcagttgaagtaacaattttcaaagcaaaatttaagctacatttaaaaaaagcaataaaatatttatgttttattttaaataagctgaggattatttctctgcatagtgtgcattagtttaattcatttgacatgaaaaaagttcattatgttaaattctagacgctgtatgagacaaaccatatttaacaatttactggttcataatattggtcaattaaagactgacaagtgtccctgaatgggaagcttcaaagaaatactgctcagaaaacttgtctaagggctgtcattggaattatatgccactgtagttagtgcaagttatgtagtttctccagttgtagcacaaaataaaacccatctttaatcagagaaaataatacttaaatgtgctcatgaatatttatttcagtaatggaagaagtataattttttacatggtgagttttcataacaacagtacatatttttcctgaattgaattttttgcaaaatatttgctaaccactatggcacaataaataaaatttcaataaaaggacttattggaataatatttatatatacaataaataatcattaaccaaataatactttgttttttatttattcatcttatttttttttattttatggagcacatgtgctccataaatatgcacaactatatattcataataatttaaaataaaaagattaaatgtataaaaaattgcatgtgatactttaaaaaaagacaatatctaaagagcacaaacacaaaaatgttcacctatattaattatcaagaaaaacaaatgaaaacaatgatagggttaccattttgtattgagtataaggtaaatcctactggtggtgacatcatatttattgaagacaaatcgcattatatataaaaatctaaaaatgattcaatgcctctacttcatcagaaaataatggctaaaattttaaaataagatagaaaatactaggcagtagcaaggatatagaatatttgcaacttcatatattgagggagtgatttaacgtgtggtagatattttagaagactgggagtatttactaaagctgaacataagattacatagaagcaaattcactcttacatatataactaagagaaataaatgtacattctcaatgaagacatgtacaaggatatgcatggttgtactaatgatacaagcccaaagagcataaatccaaatggccattaaaaaaatggataaagtattggacttcaacatgcaatatgtttatgtattatatatttttatgaatgaatgtatattttgcaatgagaattaactattgatacaatgaataacataatctcacagcatagtgttgagcaaaagaagccaagaaaatagaatattttatagtagatgatttcatttacacaaaactcacatctatcagagcttttctgtcatattataagtcaggagactatttacattgagaaggataatcaatgagaaaaggcacagggagacttctgaaatactggtaatgttccacttttaatcaaggtgttgctgatctagcagtttcatgttatgaatatttattatgatgtttacctatgacatatatttctgtgtgtatgcttttattcagtaaaatgatcctttgtggaaaaatggatcctataataaagtgagcttttatgtctatatgctctcatttctgaacttcagtgggatgccagtaaaaaaactataaaattctagaagaagtaggaataattacatcaatggatcagaaatattaaggagtctttgaacaacagaaatcaaacaggatcagatgtatgaataaaataagccaaagaaagtaacagctgtgattgaatgactaaaaatatggttgacaccgggagacagaggttgcagtgagccgagattgtgccactgcactccagcctgggtgacagagagaaactccatctcaaaaacaaacaaacaaacaaacaaaaaaagatataattcacgggagtttaaggtccatattccactaattaactcatcaaaatgattacgtactttaacatattaagatgcaacagctaagcctattctccttccttttccacaaccaccaattgtgttaaggagtgctgtttgtcaccaagctaaaatagaatgggtgttgacattggagatgaagtctatctactgaccttgagaagggagtataatttttgacatctagatgaaaagctaccaacacaatatttacctttccctctaaaatcaccataagttctttgtaagtcataagcttttgtaagtcacagagaaaatatggaggtaaataggatttatgaccaaaaaaattacaaaatgtataattatcaaaaatttgaggacaacaaacaagtataatgaaaagaataaatctagcattttttactccaaaatggtggtttagaggttttcagcatgcttcagccacttggaaatagcaagacagtgcataaaaatcaactctgtgaaattgaattcaaaaagaaaaataggaatccactggaattaggaagtatatgccaaccccagggaggaggatgcagcaaacagcccctgtgacattgtctagctgataaaattgagtgaagccccagtacctgagagaggagacccccctccaccaactctatgactcacctttccactgtggatccaagcaacatacaccaagggagagcactttgtttctcccaagacctagagctaatattgtaagaggcttgaagatgctatgagggaaagacatgggaaaaatttgcagacattttccctgatccgggactaagagcagggtgccatttttaatttgggcacatgcaaagtcagcccctctttggtgacccggcactgtggctgctcaggcatttcagtcttgggtcaaatactggagcacctgctctggagtggagtagaggcctccacagtgggaactctggaaagcacctcagagatagatgctgcaattgtgctttcccctgttgcaagtgtagggcagggaggagagctgctacagatgcagtttctcctgggctggaagacttgcagccagggccagcttggtgacctataacccatctatgtgtgccagtacagtatgccctagccttactgctgagatcctgctacagcagggccctctctactccacccccaggcagatttccaggcatttggagcatccaatcacctgaatcaggagcctgatatgccacacagttcttgtgcagagattctggtgcaggaaggccttctctgcttcatgcccaggcagatcaccagggattcatagcaccagctgacctgggtcagcagtctgagtaactccacccctcctgtgtgtgtgtgtggagcagggaacccttattgctccacatccaggtagatctccaggcatctggagcgcgtgctctcctggataaggagtttaggctgctctcctatccctggagagaacctggggctagagaggtttctcagctccatgcccaggcaatggtctgggcaattgatggccacccactggattcttcttagctactggagtttgtgtctgccaatggaggacctgtagatggacttgcttgatctagctcttgccaggatggccccagcttccctggggctgaggagggagcattccacaaatcagccgactgactgaggcaacagagagctttcagtgaacaagaataaagtatatacccagcctcgtgggttgcagccagctcttaatgataactgccatccactggctggtagatcttactgtacagcctgatataaaacctgccaacaggagggcatatggctacagaatcaaagccaaaagaccctacccagcatatgttacagttgcataccctagggaaaacaggaaagagaaaagaaatgaaaaagcacaataatattatagcaaaagaaggaaaaagaaaaattcacctccatgaatcaattgcaataattaaaaatgccagcatttccagatgcaaagaaaccagtgcaagaattcaggtaccataaaaagtccaaatgtggtgaaactatcaaaggttcatgctatctctccagcagtggtcactagtcaaaatggaaactcagaaatgacagaaaaaatattaaaaactgcaaagcatgaattgtaagaaagttcaatgagatccagaaaagattaaaaattaatacaaagacatttcttttttttttttttttttttgagatgaagtctcactttgtcacccaggctggagtgcagtggcacaatctcggctcactgtagtctctgcctcctgggttccagcaattctcctgccttaactcacttaagtacctagcctaccagaccccatacatcagccacacaatagaaactacaaagcaaccagctaacaacttcatgacaggatcaaaagctcacatatcagtattgaacttgaatgtaaatggtctaactgctgcacttaaaagacacagagtggcaagttgcataaaaaaaaaaacaagacccaaaataataatgggggacttctacatactattaacagcattagacaaatcataaaggcagaaaactaacaaagaaattctgatttaatttcaacacttgaccaattgaacatctagagaacatctcacccatcaactacagagtgcagagtatacattctttttgtctgcacatagacatacttcaagatcaagaaaatgcatggtcataaaccaagtctcaataaattgaaaaaaatcaaaatcatagcaaccatactcttcagaccacagtgtaatgaaaatagagagaattatggaaacaacaattaaagatgagatttgggtggggactcagccaaaccatatcattttagcccttgcatctcccgaatctcatgtcttcacattttaaaacatagtcatacctttccaacagtcccccaaagtattaactaattccaacattaactcagaaatccaagtccaaagtctcatctgagacaaggcaagtcccttccacttatgagcctataaagtcaaaagcaagtgtaaattacttcctagagacaataggagtacaggcattgggtaaatacatccattctaaatgggagaaattggccaaagcaaagggactacaggcttatggaagttcaaaattcagtaagacagccattaaaccttaaagttccaaaatgatgtcctttgactgcatgtctcatatccaggtaatgctgatgcaagaggtgggcccccacagcctttagcatctctgcccctgtggctttgcagggtacagccccgctactggctgccttcacaggctggtgttgtgtgcctggaaaagttataatctgttggtggatctaccattctggggtctggagaatgttggccctcttctcacagcttcactaggcagtaccccagtggggaccctgagtggaggtttcaacttcacatttcccttccacactgccctagcagaggatctcaatgaaggctccacccctgcagcaagtttctgtctgaacatccaggcttttcacacatcagaaatctaggcagagattcccgaaccttaattcttgacttctgtgcacccataggctcaatgccatgtgtatgccaccaagccttgtggcttacactctctgaagcaacagcgtgatctgtagcttggccccttttagccatggctggagcagctagggtgtaggacaccaagtccctaggctgcacacagcaggatggccctgggcctggcccaggaaaccatttttttccttttaggcctccgagcctaagatggttggggctgccatgaaagtccttggcaggccctgtagacattttccccattgtcttggtgattaacattccactccacattacttatgtgaatttctggagatgacatgagttttaccccagaaaattggtttttattttctattgcattgtcaggctgcaaattttctaaatttttattctctacttccacttgaaagctttggcgcttagaaatgtcttctgccagatactcaaaatcatttctttgaagttcaaagatcctcagatctcgggcaggagcaaaaggccgccagcctctttgcatagcaagagtgaccgttactccagctcccaagaagtttcttatcttcatctgaggccacctcagcctggactttactgttcatatcactattcagcattttggtcaaagccattcaacaagtctctaggaagttccaaactttgccacatttttctatcatcttcttagccctccaaactgtcccaacctctgtctgttagtcatttctaaagtcacttccacatttttgggtatctttacagcagcaccccactgtactggtaccaatttactgtattattccattcttacaccactatgagggaataccagagactgagtaatttataaaggaaaaaggtttaattgacttacggttctgcatgactggggaggcctcaggaaacttacaaccatggcagaagagaaagcaaacacatccttcttcacatggcaatagccaggagaaatgcagagtgaagtgggggaaaagctctttataaaaccatcagatctcatgagaattcactcactatagtgaaaacagcatggaggtaacagcccccattattcaattacctcccaccaggtccctcccatgacatgtggggattatggaaactacatttcaagatgagatttcaatggtgacagaggcaaaccatatcatgcaaaaactggaagcattcccctttgaacactggaactagacaaagatgcccactctcaccactactattcaacatagtactggaagtgctagtgagaacaatcagtcaagagaaagaaatgaaaggcatccaaataggaaaagaagacatcaaactatttctcttcacagatgatatgattctaaacctagaaaaccctaaacttcctgccaacaggctcctggaacttatttaaaaaaaaaaacttcagtaaagtttcaagataccaaatcatccaaatcattgtacacaaattagtaacatttctatacaccaatgatgtccaagctgagaaccaaatcaagaatgcaatcccattcacaatagccacacaaacaaaaacataactagtgttaccctaagctgcactattttgtaaattctcatcattttgcaaaccctggtcagagtaaacaattccactagggctcgggccatgagaaacgtcctgttggagaagtcccaggcctagctgcctgtccacagaaaattcctcacttatcagcagataaccacactgccccatccctttgtgtaacaatcccaggactctcctgcccatgcctataactatcccgttggtaagcaggggcaagctctggtgctagctggtgtccccttctgcaagtctttgctcaataaaccttgttgccatagagcatcctctattctgttccttctccccttcctactctaatacctaggaatacacctaatcaaataactgaatgatttctacatggagaactaaaaaacactgctaaaagaaatcatagataatacaaacaagtagaaaaacattgtgtgttcacagattagaagaatcaatgttgttaaattgccatacagctgatagtaatctacagatccaagcctattcctctcacaacaccaacatcaattccacagaactattaatagaaaaaaaatctatttaaacattcagatggaaccaaaaaggagcccaagtagacatagcaatcctaaacaaaagaacaaagccagaggcattatattacctaacttcaaactatactataaggctacagttaccaaaactgcatggtaaggtacaaaaatagacacatagactaaggaaatacaatagagaaacaagaaataaagctgcccaccaacagccacctaatctttgacaaattcaacaaaaataagcaacaaggaaaggactctgtattcaataaatgcttcagggctaactggctagtcatgtgcagaagaatgaaactggaccattacctttcatcatatacaaaaatttactcaagatgcattaaaagtttaaatataagacccaaatataaaaatcttagaaaaaaacctaggtaacactattctagacattggcattgggaaatcttttatgactaaatgctcacaagcaattacaacaaaaacaaaaattgacaagtgagacctaattaaactaatgcacttctgtacagtaaaagacactatcaacagggtcaacagataacctacagaataggagaaaatatttgcaaactacacttccaacagaggtctgatatctcaaatttataagaaactgaaacaattgaataagcagaaaaaaaaaacattaaaatgggcaaaagacataagcagacacttttgaaatgaagatataaaaaccctcaaaaaacatgaaaaaacgttctacattacttaccagagaaatgcaaatgatataccatctcataccagcaagcatggctattactaaaaagtcaaaaaacaacagctggcaaggctacagagaaaagggaatgcttatgtgctgttggtgggaatgtaaattagttcagtcactgtggaaagcactatggaggtttctcaaagaccttaaaacagaactaccatttaacctagctatctcaatactgggtatatgttcaaaagaaaataaattgttctaccaaaaagacaaatgcactcatatgtttattgcagcagtatttacaatagcaatattgtgaatattggaatccaacctaggtgctcatcaatggtgtatggaataaagaaaatgtggtacatatacatcatggaatactatacagccataaaaatgtatgaaataatatcctttgcagcaacatggatgcacctagaggccatcactttaagtgaattaacgcaggaaaataaaaccaaaattctgaatattttcacttgtaagtgggagctaatattggatactcatggacataaagatggcaataatagaaactggggattactagagtagaaagggaagtacaaagattggaaactacctattgggtactatgctcagtaccctggtgatgggattatttgtaccccaaacctcagcatcacacaatatacctagataataaacctgcacatgtaccccttacatttgaaataaaaattttaaaaaatcaggaatgaataacatgaaactattttaaacgacaaatttgtctgctaaataatcaagtcaagaccaagaattaaacacaaaaaaatcaaaaccgtgtaagatatgagaataaagttcaaaggtaattttgagagagtgtatcctccaggatcttacagaacttgttaaaaaagatagtataaaaaattgggtaaagaaagatcaaatacttaataaaagacttcggataactgaagaaacacatgagtattcattccataagagcccacaaaatgaccacagacttacataaaaatatctacttctaaactggtttctaaacatctagttatatacattgtgattaaatttcattatgccaacaataaaggcacccaaaacatatccagaaagaaaaagaacccaagttatctacaaaagaatgaacaacaaaataacatcaaatactggaaaacagtggaaaaaatatttgctaagttctatggaaaaatgcttttaagcatagaattctatactaggcaataacaccattcaaaagggagagcaaaattatatattcacatatgtaaagactcagaagttttatgaccacggacacatttctggaagaattacttgaggtacattttcaaaagatacattatgattccacaaaaaaagaggaaagataaaagcataagagataattgtgagcaagaaaaatcagtaaatgtttaagtttagatacttgtacatgtaaactgtatattcttgttaatagcagactgatataaagtgccatatagtgttaatttttttataagtaaatacataaaaaccttactttccaatgaacaaataaaaaataaaacaaatgcataattaacagaggacaatatatataaaaaatcatcaatgcacaaaaagaggctcaactgtactaggaaaatgctaataaaaacaacgatttactatgtgttagctttcgattgggtcaaacatatataattgataacagccatggaaaggctgtggagagactggcattttttccccaagatagttaaaaattaaaattgtgggtttttactgatagaaaactgacaatatctatacccaaatcaaaattttactcatattttaattcaaaaatcctatgtcttttattctattcttaaggaatgcttgcaaatgggaataaagatatacattcaggaatatcaactgcagcatcactttaaatagttaacatgggaaaccatttgaatgctaatcaatagaagaatatttaagtttaataatatactcagactgtagaatattatgtaattattaagaggactaatatagtctaagatctcctgatatacattagttgctaagccttaagggcactttagcagaaacaggaaaattctggaacaaaatatagaatttgatccagtttgttgaaaacatttagaaatatgtgtatgtgtttgtgtgtacacatctgcagaaaattttttgacaaatgcttaaaaaattctattaggagcagttaatttggggaaaaagtagaggtatggagggctaaaagtagggccttttccattcatctttttaagctcttgcaacaaggatgtattgagatggatagtagaaaaatgtaggcaaaaaccactacttatgcctgtttacatctttgcttttttattttatgttattgcttgttttattttgttttatattttgctgtatcctctatctctttaatggcaaatccagtctgttcgtaaattctcaagcttttcctctatttactgatttccattggtctttctgattggagctcaaacatcccctcttcaaggtggtctttcttgtctatttcttcttcttcttcttttgttgttgctgttgttgttgagacggagtcttgctctgtcgccaggctggagtgcaatggtgcaatctcggctcactgaaacctctgtctcccaggttcaagcgattctcctgcctcagcctccagagtagctgggactacaggcgcatgccaccatgtctggataatttttgtatttttagtagagatagggtttcaccatgttggccaggatggtctcaatctcttgaccttgtgatctgtccgcctcggcctcccaaagtgctgggattataggcatgagccaccgcgcccggctgcctattccttcttaattccacttattcttccaccattgccatcgtatttttttcaaggcattgatatctatctaaaattatacctcatatatatttatttaactgtttactagagatgccttcaccaaaccttagaatgaaaattccaggtaaacagatggatgttttattctcactgctatagacctagtggcagtacttggcaaacattaagcactaaataagtatttgttgaatgaatcaatgaatcagtttagatttctattttgtcatctataaagtgaaaacatttctgagattacatttgggaaactatcaaaaatgaagcaagaaagctggattcttttcaaccactaatacttgggaataatgtggttctgaaaggcaaggaagatcataatataaaattgaatctgtccactaaaaccaaaaatatagaagagctctgtgatgttttcattcaaatggcttttgctgtttactttaaactacattgtggagggaaaataatgttatgttcttcccaaatgaagataataaaatcctcaaatatcagttatttgggggaacataacttcttttcatatgtgaacaagggtaaatgaaagttggaaatccttcagctcaattaggtctatagcttccgcaatgagacattctgcccacatctgtccagatatgtattcctgaggacacagtaatgcattttttgaaggcagcaagatgctattatagtaactagatgaaatagtaatcctagcatccttgactaattttcttcagtagatatattgaagtttcctaaagccagatgttcaacttgccaaattaaacagtgaaactgcctaatctttgacttataaacctagagaaacaaacagtctttgcttttgcatgtttagaaaaaattaggttcatattcctgactcctttaatactgatttattcaagggtattattcagcatgtaatagatagtttaataaaaacatgtagaaaaacatacagatatactgaaggtaatttctttaaaattaaaaaaattcttttaattacattttatgaagagaagcaaaaatacataatcagaaagggttgtacaaaaaaaactgacaaaaacctgctttctgaagtcctacatagaatatctctagtaatgtaagacataaatacccacaggttttatgccattattttgactccagtgatatctaagaattttattctgtctttccttgaaaaagcaagtgatatggtttggctgcatccccacctaaatctcatcttaaactgtaactcccacaattcctacgtgtcatgggagggatcaagtggaaggtaattgaatcatgggagtgagtttttcccttgctgttctcctgatagtgaataagtctcatgagatctgatggttttaaaaaggggagtttctctgcacaagctctctttgcctgctgccatccacataagatgtgacttcctccttcttgcctctccccatgattgtgaggtctccccagccacgtggaattgtaagttcaagaaacctatttcttttgtaaattgcccagtcttgggtatgtctttatctgcagctgaaaatgaactaatacagcaagtaaacttggctgactgaaataaaatggtttaaaataaatgtaaattgccacatgatttgttggatagtaaaacagcatatatgattatatcattaatcacaataaacaccattcctaccaattattgttatatatttcaccataagacatttatagaaaaattaacagcatgctgcctcaccttctaccatggcaaaatatttctaaaataaactaattttgagtaagaagcatttcaactgaaaatgctaagaatgttataattactatataataattttttaatcttagtgacctcagtcagatggcagaaataaaattttctatgatcatctgcccatcgtgcatcaattttgacaaccacccatgggtaagagtatttatgtgcgagtctgggaattcagtgaaaattttccagcacacgattagagcaaaaaaaaaaatccaagaattgatgcattgaataattcagtctgtaaagactggagaagatgactctttcttcaaatgtaaagatgctaatgtaagacttcaaacaacacacctacaaataaaattaaaagaaactaaaaaacaaaaaaattcccccaaacaatgaagaaaacatgagaaaaccaaaggaacacaatgtttttagtaactgatctcccaaaaatggaaatttacaaattacctgaccaaaaattgaaataattgccttaagaaagttcagtgagctgcctgagaacgtagacaactcagtgaaatcaagaaaatagtatacaaaaaattgagaagttcatcatagataaatcaaaaaaaatagaacaaagcagaatgttaaaattgaataacacaataaatgaaatgaaaattgcaatagagagcttcaaaagcagacttgataaaacagaacaaaagtatttatgaactcaaagatacgtcacttaaaattatccattcagaggagaaaaaggaatggatgaagaaagattacaggattgaggatattatattatgaaaaataatatatggatttggaagtatcagaaagaggagagagaaagagatagaaagcatatttaaagaaataatggttgaaaactactcaaatcctgggaaagatatcaacatcttggaagaggtggatcaaaggttctcaaaaagtttgaaaccaaagaggacttcactgtttccccttatcatcaaactgcaaaaatcagaagaaatagaaggttttcgaatgcaacaagagaataggaacttgccacatatgaggtaaatctcaataggctattaagagatttctcagcagaaaccttgcagaccatgagacagtaggacaatatgttaaaagcactaaaagaaaacaataacaacaactggtaaccaagaaaatatccctagcaaaattgtccttcaaaaatgaaggagagataaacacatcctcagacaaacaaaaaccgagaaagtataccaccactagacttaccttaacaaaatgctaatgctaaagggagttcttcaagattggtttaaaggatgctaattaataacatgaaaatatatgaaattgaaactcactggtaaaggtaagtatataatcaaattcagaatacttcaatatggtaatcatggtgtacaaacaatttataactctagtataaaaggttaaaagaaaaaaataaacatagctataactacaaaaatctttatatgaatactcaatattacttcaaaaaccaattgtggagggggctaacttaaataatataattgttgatgtaattgaatttaagtgtcaatgagtttacaataaagtgttatatctgtaaaatattgcatatagccccaagataattccaaagaaaaaaacctacagtagacaaacaaaagataaagagtaaggaatcaaagcatcttactatgaaaaactggcccagcatggtggctcacgtgtaatcctagcactttgggaggtcaaggaagttggattgcttgagctcaggaatttgaaaccagcctgggcaagatgcccaaaccccatctctactaaaaatacaaaaaattagtgaggcgtgatggcacatgcctgtagttcagctactctggaggctgaggcatgagaatctcatgaacctgggaggtggatgttgcagcatactcaagcctgggcgacagaacgagactctctctctcaaaaaaataataataataaaagacaaacaacaaaaacccaaagcatatcactatgaaaaagcatccaattacaaagcaagatggtaaatgagaaagaaaaaaagggactacaaaatagatgtaaaagaattaatcaaatggcaatagtaagtcttaataataattacttttactttaattactttaaatatactaacaattactttaaatataaatttactaacttctccaatcaaaagacatacaagcggagaatgaattctttttaaaaacatccaattgtatgctgactgaaagagacctactttagctttaaggacacacatataatgaaaatgaaagctagactaagaaaaaaagggaaaactcaaataaataaaatcagaaatgagaaaacagacataacaactgagaagtacaaagaatcactggagactataattaacagtatgacaacaaatcggaaaacctagaaggagtggatacatttctggacacatacactcctgtcaaagaaaattctaggacctgagggttttactgctaaattctaccaaacatttaaagaagaactgataccaattcttctctaattcttaaaaagaaattcaggaggagagagcactgtcaaatctatcctgtgaggctcacattgccctggtccaaaagcagataaggacataacacacacacaaaaactacagccagtggtccctaatgaacatagatgcaaaaatcctcaacaaatgatcctcaaactgaattcaaaacacattaaaaagatcaaaagatcatttgccatgatgaagtggaatttatgcctgggatgcaagaatggttcaacataaacaaatcaatctaagtgatatatgacactaacagaacaaaacaaaatggagaaccaaacatatgaacaaatatatggaaaaaaaaacacatgatcatgttaatagatgatgaaataagtatttaataaaatttaacatctctttacgataaaaatcctctataatctgaatatagaatgaaaatacagcaaaataataaagactacctacgtcaaactcacaccgaatataatactgaatgggcaaaaattaaaataattttctctacaatctgtaatgagacaggatgcccagttttatcactttaattcaacaaactactggatattgtggccagagcaattaggcaagagaaagaagtaaaaggcatgcaaattgcaaagaagaagtcaaattaaccttgtttagagatgacataatcttacatttagaaaagcctaaagactccaccaaaaaatggtgagaactgaaatgaactcagtaaagtggcaggacacaaacctaacatacaacaatcagtaacatttatatacaccaatagccaatgatcctccccacaaaaaaaaatcaagaaaacaatcccatttataaaagctacagggagtataaaataacctaaaatcaatttaaccaaaacataaaatgtctataaaaataaaattcaaaacacacttgaaaagacaggggaaaaaagtgtttcatgcttatggattagaaaaattaatattttgaaattggcaatactacccaaacaatttgtagatttaatgcaatatctatcaaaatactaataaaatttttcagaaaaattgaaaaaaattgtgaaatttgtgtggaaccacaaaagacctggaacagcaaaagcaatcctgagtcaaacaaatagaactggaaacatcacattacccgacttcaaaatatactacaaagctatagtaaccaaatcagtgtggccctggcataaaaatggacacataagttaatgtaacagaatagagaaccaagatataaatccacacatttatagtcaactcatttttgacaaaggtgccatgaacatatgttgggcaagggacacactcttgaataaatagtgctatggaaactgaataactacatgcagcagacccctacatctcacgatatacaaaaatcaaaaatggattatatacttcagtataagacttgaaactatgtaactactagaagagaacattggggacattccaggacattgattttggcaaataattacttttagaacctcaaaacacagacacagaagcaaatatagacaaatatggtcacatcaaaataaaaagttgctgcacaacaaaggaaacaagaaagtgaagcagctattcacagaattggagaaaatagtttcaacatatctatctgacaagggattaataaggggaatatataagaagctcatacaacttaatagcaaaaatatagtctgattaaaatgggcaaaaaatctgaatggacatttctcatgtaagtggtcaacagatatatgaaagaaatactcaacatcattaataatttgaaaaatgcaaatcaaaataacaataagatattatttcatcctagttagagtagcttttatccaaaatacaaaaaaaattaatgaatgctggtaaggatgtggagaaagggaaattctcatacactgttggaagatatctaaattaggacagccactatggaaaacactacataagttcttcaaaaaactaaaaatagaactgccataagatccagcagtcacattgctggatgtatttaaaataaaatcaatattaaagagatatctgtccccctatgtatatttcaactttattcacaatagcaaaaatatgaaatcaacctaaatgcccatgaatagatgaataaataaaaaagtgatttatgtatttgtttgtgtacatataaatatcacatttcttcatagatatctatgaaatatttatatttcttcatacaggtataccacatttacatactgatatgaattggctctgtgtccccacctaaatctcaccttaaattgtagtttccataattcccacgtgtcatgggagggacctgttgggaggtaatttaatcatggggttggttatcctcatgctgttcttgtgatagtgagtgagttcgcatgagttctgaggtgtgggagttcagtcagtctggtgggaaacattttaaagatagttagagaaatacacataaatcttggaaggccagagggtttgcataagctccagtaatagatctggctgaaggcagcctaaccggtaacttgagtaaatagtttaaggcaggtacaaaggaatgtaagggagtttatctaaatagcttgcctactcatgtggccctaagactaacctttgattattcatgggcaggatggctctctcagggggagggcaacaaaattagttacccacaggtgtgctgactcaaagcctttatcatttaaagtgtgctgaataaatgccggcagggtcagctagtcaggactgcgactgctactctttacagcaccttcctcggtgtttgtgaggggcctggactcttagccagactgacaggcagaatatctgtgtcagtgtacattattcatctgtggttcggtcagagtctgcgggacggacccctgactgacagtttcatgaggttcttttccctgttttgctcgacacttctccttgctcccaccgtgtgaagaaggacacgtttgcttccccttccgccatgattgtaagtttcctgaggcctccccagccatgatgaactgtaagtcagttaaacctctttcctttaaaaattacccagtctgagatatgtctttattagcagtgtgagaatggactaatacagtaaattggtaccaggtagtggggtgctgctgtaaagatacccaaaaatggggaagtgacgttggaactgagtaacatgcagaggttggaacagtttggacggctcagaagaagacaggaaaatgtggggaagtttggaacttcctagagacttgttaaatggctttgaccaaaatgctgatagtgatatggagaataaaatccaggctgaggtagtctcagatggagatgaggaacttgttaggaactggagcaaaggtgactcttgttaatgctttagcaaagagagtggtggtattttgctcctgccctagagagctgtggaactttgagcttgagagagatgatttagggtatctggcagaaaaaaaattctttctttttttttttttctttttagacagagtctgactctgtcacccacgttggagtgcaatggtgcaatctcggctcactgcgcctccgcctcccgggttcaagtgattctcctgcctcagcctcccaagaagctgggaccacaggtgtaagccaccaagcccagctgatttttctattttttgtagagacagagtttcactactgtggccaggctggtctcgaaactctttacctcaagtgacctgtctgcctcggtgtcccaaagtgctaggattataggcctgagccatagtgccctgcctggcagaataaatttttaagcagcaaagtgttcaagaggaagcagagcataaaattttggaaaatttgcagcctgatgatgtaataaaaaagaaaactttatattctggggagaaattcacaccagctgcagaaatttgcataagtaatgcggagcagaatgttaatcacctgtgcggcccctctcatcacaagtccctcacaccacagcacagcagcccctcccatcacaggtctggaggcctaggagggaaaaaatgttttcatgcgctgggcccaggatccctctgctttatgcagccttggaacatagtgcccttcatcccagctgctccagctccagaggtggcttaaaggagccaacatataactcagaatgttgcttcagagggtgcaagccccaagccttggtggcttacatgaggtgttgggcttgcaggtgcacagaagtcaagaattgatgtttgagaagctccactagatttcagaggatgtatggaaatgcctggatgttcaggcagaagtttgctgcaggggcagagccttatggagaacatctgctagggcagtgcagaaatgaaatgtggagttggagccccgacacagagtccccattggggcactgcctagtggagctatgagaagggagccactgtcctccaggccctagaataatagattgatcaacagcttgcactgtgcacctgaaaaagccacagacactcaatgccagcccatgaaagcagctgataggaggctgcgccctgtaaaggcacagtagcagagctgcccaaggctttgggagcccacctcttgcatcagcatgctctggctgtgagagttagagtcaaaggagatcattttgtaactttaaggtttgatgactgccctattggatttcagtcttgcatggggcctgtagcccctttgttttggccaatgtcccccatttggaacaggtgtatttactcaatgcctgtacccccattgtacctaggaagtaactaacttgctttcgattttatgggctcataggcaaagggacttgccttgtctcagatgagattttagacgtggacttttgagttaatttggaatgttgagttaacttggaattttgagttaatgctgaaatcagttaagactttgggggattgttgggggactgctggaagagcattactgtgttttgaaatgtgaggacatgagatttgggaggagctggggtgaagtgatatggtttgactctgtgtccccacctaaaaatgaattcatatatgaattgtatgtgtcatataatctccatgtgttgtggagggacctggtgggaggtaatttaatcatggggtcaattaccttcatgctgttcttgtgatagtgaatgcgttctcatgagttctgatggtttcagaaggggctttttcaccttttgcttggcagttctccttcctgccaccatgtgaaaaagggcatgttttcttccccttccaccatgattataagtttgctgaagcctccacatccatgctgacctgtgagtcaattaaacctctttcctttataaatagtcttgggtatgtctttatcagcagtgtgagaatgaactaatgcttatacacacacacacacacacacacacacacacacacacacacacacacatatatattccacatttataaacacacacacacagacacagacacatatatgtgatacaccaggagagtccaatcttttggctttcatggaccacattggaataaaaattgtcttgggccacacataatatacactgacagtaatgatagatgatgagctaaaaaaaaaattgagaaaaatctcatagtatattaagaaagctcaaatttgtgttgagctgcattcaaagccatccttggccacatgaagcctgtgggctttgggttggacaggcttgtgatacacacacacacacacacacacacacacacaaaatcttattcagttgcaacaattgaaatgatgtcttttaatcatggggtggtgatggatggatggaacaagaggtcattaggttaagcaaaataaaccaagaaaagaaaaaggaagtcacatgttttcactcatatgtagaagctaaagacatgaatctcattaacatacagagtagattggtaggtaccagatgacagcaggtggaggtgggaggggagaatgaagagaatttgatcaatggttagaaatataaagttaggacaaataatacctgctgttatctatatcactagggtgactatagttaacattaatctattgcacatttcaaaatatctagaagaaaataattcaaacgttcccagcataaagaaaagataagtagttaaagtgatggatatcccaagtaccctaatttgattatattaatgcattcattcattttatgtacccccaaagatgtacatctaatatttgttaactaggctaaaatattttgcacagataaatttaataggctttgagcttgccattcaaaatcacaaaacacataagcaaactagccaatgtgactaagagtcatcaaacataatggcagaatcagacttgtgtagatattaaaattttgtgaaagaaaatattaaatgtttgatatgtccaaagaaataagagagtacatcaaaatatgtataagaaataaatgatttcaaaaagtctacagatttggaaaaaaaattaaccttctagaaatgaagacaaactataatagaattcaggaactcagttgaagtattaaagaggaagtttgacaaagtcaaaaataattagtaaaccagtatatatagaaaaaagctaattctgaatatagcaaagagaaatgaaatttaaaatattaaagagaaataacgaattccaaatggtagaataaaaatacatgaaattcaaactgggtttccagatgagagaaaggaaaggcacaacacttgaagagatatttgctgattgtttaccacaattgatgatacacataaatatgtagattcaagaagtctcgtagataccaaccaatcaaaataaataaatatttccacatccagattgcagtataactacacaccaccaaagtcaatgataaagtcacgttatctacaaaaagggctataaatcttctaaaaataagaaaaaaattattagagaagcattcatagcatgtgagaaacatctgggctgtaagcatgtagaagtataatgcaaatacctggtgaaatagttttccaggcagataaaatgtaatgtgcaaaagtccttggaagggaatccattaaagaatagcaaggtagtgtgactggaatccagctgaggagaatttggagagttataaaatgaggtctgtgccctagctagaggccatgtcactcactctgttgtcatctagagtaagtactttggtttttatgcaaaaaaaaaaaaaatgagaaatgttcatagagctgagagcagttataccattacagatttttatttcggtatgtttatgtgagttgtttaagctactttaactgctgtactaagtaggccccagtaatagattatgttttgcttcaatgtaaagctcaaagtgtctccatgttggtgagattcaggtttgcagggactctatcattatcaaaatatgtcttccaaaatcacctaggttttatcctacaattggaagaaaaatgaaagattgaaagatctcttgtggaagtatcagtgaatcaagaataaaaatatcatactattcatgacccagcgtagtggctaaaaccttatcacagtgccatatctgactgcaaggaaggttagggaatgtgttcagctgtgtgcccaagaacaattacccaaagattattttaacatttctaaccattgttgaatattaactaataaatcattcgatttaaaacatttcaactttcctatattttacaaagtgctcaagaatatatagcttgtgaattttcccaaaacaatatttattcttattgcctgtatgcaacctgataactttatattctgcttaattctattttattcttgtaatttttctgatttctctttttaactgttggttatgattttattgattatgacatgattttattactcacttggagattgctacctatagttcaaacatcagtgtaattcagtgatgacatctgggaaataagccctaaacgtagagtagaaatactgggatacaatgccattactgtcacttaacagccagttaggctaggccttgctacgctagatgtggtacttgaatctgcagcatcagaatcacctgggagctggttggaaatgtagaatttttactcagatttactgagtcgaggtctatatatttacaaagtccccaggtgattcatatacacacaaaagtttgagatgctttgggctaagcaatgctgcagtaataaacaatcttatattcttaggagttcaaaaatgttttggaagcaagggagctctgctcatcatagtcacttatggtctaagcctttagctaagatctcaaacattgccttttttttttttttcaagagataaaagcaatctctgggtagagaggtcttttccagtctaccacattaccaaataaataaattattcatgctcctcctgcctactgtatactaaatattttctctttcttctgaattactaataaaccttgagctcatctcaagtatagtatttactatattgtattagtttttttatatgtttgtttctgtgtttcctctattaggataaaactcacattgtcttacacatctttatatattaaatattgaataaataagtaattatttgtgtgtttttatattaaataacacatttggatttaatgacacattttctcacctgtgttaagaaatgtatcaattgatttataaaataatttagctccaagaaaattcacataaaatgaaatcactatctgggcaatgtcaggtgaagagaccttccctaaattcagtgtggttggtggatgggacgagcttgactcatgaacttaacacctttgatagcactttttatctacagataatgagtgaaaagtttaaagtattggtaggtcttggtcattgtacatatccctctgtaggagtaaaaaagaatgctacctttcaaattttctgaatgaaagtcttctagcctcttttgaattttaattggattcatatagggcaaatattctgcaagataaagatatttagttatctacaaccaatatttgtctgttgtcagatagacatgaagcccagattccttttttccgagatttcttatgagtcatttatagagcaagagctttcttttctaatacctctaaagaccaatatggtgggcaggttaaaggaatattggtaatagcatgttctcacttgtaagtgagagtgcaatagtgggtacacatggacatagtggaataataaacactgaagaatcaatagagtgagaggaagtggggaggggtgagaaattaactaatgcatacaatgtatattcttttcaggtgatggcttcactaaaagcctagacttcaccactacacagtatatccatgtaacagaactgcacttgtatcccccaagtataaaaaaataaaagactgtacctaatagatcagaaggtatctttcaatattagctcaattaacactcattacaaatttatcattatcctgaaacaattattgagacaactgagacacaaagaggtaaagtaattttctaaatgttgaagtttaagtgaaattatttagaaaaactacttatttaaaattagaaacagaactttggacagattaaaagttgccaacattgatttcacatgtatctcactctgtgttaggaattcatttctaaaacacctctcaagttgaattacattttcaatagatgaagacatgtaaaattttggacgtattaagttgtgtattttacatatctttatgtaaaatttgtttgaaggaatttccataaaatgttggaaaacaaaaaatgatagtacaaccaagaatcgaaatataaatagacatgatgacaaaagaaactgtgtttagaaaaatctcagtttcctgaaatgtatcattttcaacatgatatcacaaaaatcccaaatagagatttttaatttaaaaatacaccctcttcattataatttattttatgatatgcaaaaaacagttttgcctgagttttcaaaaattgctaagatatctatttccttatcaccacatttaggaggtcactctaactgaaagaagcaagaagtgtaagtttaaaatgtcattttccttctctctattcaaaatatcttattgagaaacccagaaattgagaactcctggtctactcgaaagaatcagtattctagtccttggtccttcatcagggctggtcttttcaaccttatttcactcttactagatgtcaaaaacatgaaaaagaaacaaacaaaaaaaactttcagctgaatttaataacaatggattaattccagacaaaacaaagaaacacatacttttgtaatatgtttaaaagtagttaaaaggataaaacaactgtaagcattcagtgaagaaataatactactgtctattgttggtaattcgtttttgttggggtaaggcattggttccatgcggtggtccccaaatttgctcatgtgttagagtcacctgagacaatttaaaaaatttgctgaccaacctacaccctgggccaataaaatcagaatctctggggggagggggttataatttataaatcatttttttcctaaatgattccaaggatgaactaaatttgagatccactggtccaattgcagtctattcttaaacctataatgactgccagcaatatttttatatcttatcaacgaccacattatgtgagtcactcttaactctccttttatgttatggaagcctgcctgataaataagattgtaggaattatttaatagtgagatacacataagttcaagtaattctcctgtctctgcctcctgagtagctgggattacaggcatgtgccaccacgcccagctaatttttgcatttttagtagagacgaggtttcaccatgttggtcaggctggtctggaattcctgacctcatgatccacccaccacagcctctcaaactgctaggattacaggcatgagccaccacacccggccaccagctacctattatgactacatgtgaagaagcagcaaagctgtaagttcagatcatagtatctaagccattcttttctagcagtctatatcatttctatttaaaatgtactcattttttccataaaatgtcaaactcaatatacctgcatgagagacatgggacttagaccaaatttactaattaaaaactcagtgggtaggacccatgcataggcattttccacaaatcctctaggtgatttttatgttcactaaaagtttcaggtcttgtgttcctataggtttacaaaattaaaaggagcaggtccagcttaaacaagaaaaaagtgcattaattataatcaggaaaaagcctctatctatctatctatctatctatctatctatctatctatctatctatccacccatccacccataggaatgtcatactagtcatgaatgctaggtcctatctagtggaagcttcagaagatttatcagtgttttaccttgttcaccttcttcttgccagtgttgagcagccaactatgatcttgcatttttcactggaataaagccaagaaggggatctcagaagatggagctctggtagtcagatgccattttccttctgcagtctctgacgcacaaacttgtatagtttctttacttgggccagattaaaattgtggccaaactggactacttgaatgcagaataaaccctagatattgttttttctgtcagtctaagcatgagtagcttttcttttccaatagctagcaggcagagagaaaatagcaaaatcagttatggaattggtatttccattaacatactgtcttttcaaacaagcaccagttgatcttattgtgtcaaatttacaaagaaactgatatatgagaaaagcaatgcattattgtagtttattatttgtgaatataattccaagtactttgttatgctgtgtaccaggaccatttttgccggtggggggtgtggaaggggagtggcatgagaggcagcacaaatgcacactgcaaaggtgtaggaacagggctcttagatggaggacttaccttatggctgtaaaagatgtgaacttctccagaataaggaccagttcttgtttatctttggtttctttccagaatctggtaaagcaactacaatactaaatggtaaagtgtgtctatcagtcttgaaagcaagtcagagttagataatatttataatattaaatgtgaatgtgctagcattatcacataaaataatactggtctaagattgaggttattcctaaatctaagctaacagtgacttagtatgtttcatttattaaccccaaatctctagtatgtggcctgatttctcatgtatgtacacctacatttaactatatgaccaaaggtggaatcaatgaatactgctcaccaccatctatatcatatagaacattaaataaagaagaatgctgaattaaatggaattataacagaaaataaagcttatgagcgtatcactaatgtcctaagccagaacaaatttataatccatatattcaaaataataaggaaagttttatcaaattttaatggttccatagtgagggtatgtcttactaataagacttccattaaggactgttttgctaccaatcaacctggtttttcatcaatacatgaattcttccagttctaaggaaggaagaaggaagaaggagaagaagaaaaaggagggaggaggaagaggaggaggaggagggaaagaaagacagaaagaaagaaagaaaaagagaaagaggagggagggaaggaaggaaggaagggatctaattgaatatcgggagagtcctgtaatctagataagaaatattttccaaacaaggcaactacctgttggcaagaacttcagggccattttcaggtgtttcaatgatgcctcaatcatgtacctacattttctatttattctctacaatctactgacgttaatggaaaccttccacctctcttagatcttgctttatactccctttcatgtccctccactacatgaattcaagtcatttatttcaccttgaacttgaagtcaaatgtataaaaattcattatgtatttcacagaattcatataacaacactattttgcagagagatccaaaattgtaatgatacatgtaaacatcctcttaagtggaagctggctaaactcagtattatttttctttgaattttatcaacagagatcaggaaatataatgcaaatcgtggatttgtttctattgtgttcttcccatggatttatttcaaaggtgttgcattctttgacactgtaaattcaaattagtttacactttgaattaaaatattctacagtattgcaatactttgccacttctggattaggaaaggagacagagaaggaggacttaaaaaaataaaggttctttccccagaaatttttaggaatagatcctccaaaatatattgtagcaaaatctggggatagagtggagagggctatgagcagtcaaacagttaccacataccatcaattttcagctttgcaaaatttcacattttaacattatttaacaattctgatgtgtcttaaaaccatgcaatatcatactttaattgtcagcaatttttctttgtagtgattcaggaaattgatataccccataactgctgatgtcttaagttctgtgttccatgaaatacagtaaatgatgggtttgcaacacagaaaaactagctgctccatctcagagcagctacttctgatattggccttcatgctcaacctaagagtatagttgcttttgtttatttgcacatttgtttgtttttctgtataaaaactaggctatcataagaaggagctagagttgcaataggatagacaatatggtagtgtttggagttaatgtgtatttataatctagggaaaaagtatactgaacatgacagaatctatggaaatgtactaccaccatcccaaacaaatatgtactatcttccctttaggcctatcattctggtgtgcaggacaggacagaagaaatatagttttgatatagaaactcttcaaaatgttaccatccatgaattctgcctgagagcataacttagaaatattctctagggaaaaataattctaaaactttggaaaaattaacatggagaaaagtgtgccgaatagaaaagcagtaaaactataggtaggtagaaataattatcagtaagacagccatgaaaattagtgtaattgtcaaaagtaattggtaagaaagaggcaaaatgtaaaataatctgagaattacactgaagaaggccttatcaaaatagcagtttggaggaggaagtgagcaactaaaaatgttcgaagtatcttgtgttatttgggaagtaattattcaaactatatgttatttcatttctagacctttttattttttattggtttattgatttatttttatttttatttagttttattgagatagggtttcactctgttgcccaggctgaatttcagtgccacaatatctgctcattataacctcagcttcctgggctcaagtgatcctcccacctcagcctcccaggtagctaggactatagccacttgccaacacacccagctaatttttgtattttttgtagagatggggtttcccatgttgcccaacctggtctgaaactcttgggctcaaacaatctgcctgccttgacctgtcaaagtgctgggattttaggcatgagcccccatgcctgggcctactttttcatattcatctttttaacttttattttaggttcaggagtgcatatgaaggtttgttatattggtaaacttgtgtcatggggggtttcttacatacattatttcgtcatccaggtacttggcctaatacccaatagttatttttttaatcatctccctcctgtcagcttccaccctcaagaagatcccagtgtctgttgttctcctctatgtgcccatgtgttctcataatttagctcccacttataagtgaaaacatgcaggatttggttttctgttcctgttttagtttgctatggataatggcctctaactccatccacgttgctgcaaagacatgcactcattctcttttatggttgaatactataatattacagagtgtatgtgtaccgcattttctatatccatcctaccatttatgggcatttaggatgattccatgtctttaccaaatagtgctgtgatgaacatacatgtgaatgtgtctttatgacagaatgatttatattcctttgggtatataccccgtaatgggattgctgggtcaaatggtagttctgatttcaggtctttgagaaatacccacactgctttctacaatggctgaactaatttacatttccaccaaccgtgtataagcattaccttttttcctcaacctcgtgaacatctgttatttttgacttttcaataatagccattctgactgatgtgagatagtatctcattgtggtttttgtttggatttttctaatgatcagtgatgttgagctttttttcataggcttgttggctgcatgtatgtcttcttttaaaattgtctgctaatatcgctttcctactttttaattttcttataaatttgtttgagttccttatagatgctggatattagacccttgtcagatgcatagtttgtaaatattttctcccattttataggttgtctgtttactctattgatggtttattttgctgtacagaagctctatagtttaattagatttcttttgtcagtgtcagtgtttgcttttgttgtgattgctttggtatttttgtcatgaaatgtttgcccatgactgtgcccagaatggtattgcctaggttgccttccagggcttttcaagttttgtgttttacatttaagtctttaatccattgtgagttgacttttgtatatagtacaaggaaggaatccagtttcaatctcttgcatatgactagccagatatatttgcaccatttattgaatattgcttgtgtttgtcattttgttgaaggtcaggtggttgtagatatgcagttttatttctgggctctttattctgtttcattagtttatgcatctgtttttgtaccagtaccatgctcttggttactgtagccctgtagtatagttgggtagtgtgatgcctccagctttgttctttttggttaggattgcctagggctatttcaactcttttttggctccatatgaattttaaattttaagtagtttttttctagttctgtgaagaatgccattggtaatatgatagaagtaacattgaatgtgtaaattgctttaggcagtatggccattttaacaatgttgattcttcctatccgtgagcatggtatgttttccatttgcttatgtcaatctgatttctttgagcagtgtgttgtagttttccttgtaaaaatatttcatctccccagttaactgtatttttaggtattttattctttttgtggcaattgtgaatgagattgtgtttctgatttgcctctcaacttggctgttgttggtgtacagaaatagtttttacattgatttttttattctgaaactgctaaagttgtgtattagttgaaggagcatttctgcttagactatggggttttcttgatgtaaaatcctgtcttctgtaaacagggataatttgacttctcttcctatttcaatgtcctttatttttttctcttgcctgattgctaggacttttaatactatgttgaatagaagtggtgagagaggacattcttgtcttctgccaattttcaaggggaacgttttcagcttttgcctattcattatgatgttggctgtgcgtttgtcatagatggcttttattattttgagaagtgttctttaatacctagtttatcaagagtttttaacatgaagacaggttgaattttatcaaaagccttttctgcatctattgagaaaatcatctggtttttgtcttcagttctgtttatgtgatgtatcacatttattgattttcatattattgaaccaaccttgcatcccagggataaagcctacttcatcgtggtggattagtttttttgatgtgctgctggatttgattttctagcattttcttaagtatttttgcatcaataatcttcaaggatattggcttgaagttttcctttgttgtgtctctgtcagattttggtatcaggttgatgttggcctcataaagagttgttgaggactcccttctcctcaatttttttgaatggcttctgtataaatggttccagctcttctttgttcatcttatagaattcagctgtgaattcatctggttctgggtttttgttgttgctgttattgttaattggctatttattactgattaaatttcagaccttgttatttgtctgttcggggaataaatttcttcctggctcagtcttgggagggtgtatgtgtccaggaatttatcaatgttttcaagattttctagtttgtcatttctataccttttcaaaaactctgtagattgtaaccacaagaaagactagacataggacatataattcctggatgaccagcaagtacctcagcacacataccaaagcataagaaaattgtaattaattcagcttggggaagagagaaatagcaacaaagcactgtgtaaagaaatagaaacattaaaattttatataaaataaaacatattttccatcagttagcaacaggatgattcaatgcgtgactttggaagttcctcctttgacaccagaaacataactacgtggcactgatggctcaacttctccatgctcaccttcttccaaactcagtcttcccttttctcacttgggtggagggtggaagaaacagtgtgtgttttcaacttcttataggttgaggagggagacaaattatcttggcgctggagaactggtcccgagtttcaggcttcctaagcctgagaccaaactatttgtcaactgtgcaagactatattcacactttagctctaaaaacttagcaacaagaatagttctagagttgcagtttttaaacattttggtctcagagcccttttactgtcttcaaaaatattgaagatcctaaagtttgtgtatgtagtacttatttattgatattttccatattaaaaataaaactaagaatgaaacacctgatctatttaactgtaaaccatttacatgtatgtataaatatttcaataaaatgtaactatattatgtcaaccaaaataatatacaaaacaatatatatatgatcatcagaattgatagctcaatttatttgataaaaatcagttctcatttctgataattctgactaagataggcatagaaataacttaactagttcgggtaacataattcccaccagacacctaaactaagtagattgtattcatttcaaaggcagttagcttggcattatgtattttatacctctgtagtctgctgatcccatgagaacccaaagcggttttgtttcattacttgcctttgttctcaataacatctttgaaaaactgtggaaattgtgagggggtggaatcaatttagaatttaaaaagtcagaggatctgaattcagtactttgacctgccatttaagaactacaccccacaattctctttcttcactatcagggtgaaagcaataatgcatgtcttacaatgctaaggataaacaatgtgacaatgattttcacagagctaaacatgctaacacaaaaatatttatggacaaaacaaaaacatgaaaccccactatctcctaaactccactgtgagtttttttttgtagaactagttgtgaatgttgaaaaaagaaaaagagcatcaaatttcttcatgaataaacactattggttctacatatatctctacatttttaaaacaacatttaagataatgaatttgttacttttaccaaacaatatttttaaaagaaatttttgatgaagtacagctccttctccatatttcttttatcatagaacactgaaaataatttttaaactatacctttgaagctaaaaatttgtccatgtggttgactatcaaatgtatatcttagggaaaaaaataaaagcatacagataaaagcatgtagtttcatttcctcaagtcttccaattaataaaattacacattggtttctattgggacaagccaaggaggggttagaaggcagagacattgatatgaatgattattatcataacaatagtttttggaaatttttgcaccccttggagaactgtgaggttgaaggatttgtagatcagtgtttcacaacctgcattccctaatatttactgatttatgaagagcaaaatggagctctgagaaatattttctccatttcttttcgcctcccagaatagactagagcttcctgagagtgaccagttcttactcatctctatatgtccagtgcatctagaaagtctcatacccagtagaagtttagtattttcttaaccaatctatgctaactaaatttattgaatgtaaaaacctaatcatttctgtgtgacatgttctttgaaagcttgttcacaccctatattgcccaagatcgtttacatggttagtggcctatcattcaatttaattgtaatttactgcacatttactgcgcccctaacaatttcactatctgttgggctgtttaaaaatatgcacttccccaattttcccatcagccagcatgttcctgtatcttttgcattctattatgcacttcccaatgccagtttctgtatctttcagttcctttgcatatccagattgctttggtcaggtacctgttcacaggaggcatgcaatcaatatatttttccaagtgattgatatttaatacttgccagtgtttgtgattgttgtatttcatcttgatttaaaccccatagtaggtatattttcttttggctgaggcttcagcaaaacagatggcatgtgtctgcacattgatctctcctgaagtggcagagtgaaatactttggttgcagaaaaaaattgtttagaagcctctgaattgacctctttgtgtaccaaatcgacattttgtgcagctagttttatctttgcttaaactagtattgatcaaactattaaagatggtgttatggtttgaaaagctcctcttgaagcaccaacaaaaataatggtttgcatttaaatctttaaatcaatcctcatcttgttgactatcacagggttttagatggtggagaccttgattaattcttttcaatcttatttaccacgaataaagctataaaggtgtttgagcactctactttttgtcattcactgttcggtttattacaccttctaccatcattccctgccctttgcaccctttgtctacagaaatgcagttttctagaaacacttgtttagatgaagaatcagaagtgggtaagtgatttttgaaatattgaagggctctggtggaatgtaagggtgatttaccataatcacacaaagagaaacagaaacaacagcaacaaaaaaacctgagagaacttgtagaacaccttaaacagcttaaaatggtctttattacaagaggagtgattaaattattacatgagagaaatgaaacttgggattttcggaatgagggcattcttaaatttcattgctgagaaatgtgtagggttttagccgagatttggaaagcttttaggcttctatttctcaggtaagcctaggaaagactagctttcagttgaaaatgggtcacggcaagaaaatagtattaattacagttaaaccctccaaagaactctactacaaagctctagatagaggataaaattaattccacagatttgcaacattatttatttattcttatacaggctcagaagcactcttagctaaatcaagctctggcgttaactccacctgaaaaatacaacaagaatttaatgtgccatttcttgatcatacatggttactatgggattataattttcatatttgtttgttctgcacatgcttatctttgcaattatttgccatgtaaaactcttaattgctgatgacgctgtgttaggttgttggcaaaagcgggggtagaaacttacaaattcattcccatcccctaatcagtacaactcaaaactttaagtagacttcgtagcgctcagacctttcttaattgtggctatatgctgtaaagtgtggaacagaaaaaccacccacatgtccccctctgccctcttactaccaatataaaacttcctccctctcttgccttctgcagagtttgacatttccagcctggaccattattaatgagccacagcttagcataggtttatcaaatgtggaaagaatgaggatgaaatgaaatgagatgtggaactaagtaaagtaaaggcaggagatcacagtgggttggtgaggggcgtgtaataatttagacagaaaacgtatcattgccaagggaaaaattagaaaatttaggggcagtgtgtaaattttattgtctaatgattgtgtatcagtaatatcatttaatggatgggacaggaatactaagtgtcttcctatgtgggctgtcaaatggaacaaagagttgcctattcttttcctgacttttgaatggcctgctagatttccagaaaatgtttacctgagcctctagtctaattccattttatatataaatgcaaatttttttatatcactatacaatgacctttgcagtaaagtgatgaaagtgtaagtcatattaagctcaactgtttaacaagaattgttctcaatttcagaaatagatttcactgatggtgataatatcgtagtttttttttttttagttaaagcattaaaatggtatatttaaattaaatatttacataaatcatttataaatttaaatataatatagattactaaatatatgtaataataagaaaatattttgtgaaataagatttaaaacaatgaacttataatatgtgaagggcctggggaatgggaaccctagaggacatattcacctatccactgacagccataggcctctaatccagtgcattcattgactgaggaattcattctgtctttcacatattacagaggctacagcactgttgtaggtgctggagattcacaaagtaatatgtcttcaatccctggtcccaagtagttctggtgggagaaatgaacgcatatatgaatatttacaatatgttgaggaaactttaattatagaagtaggcctaatggaagaaaccttaccaagtatagaagaaaggttacctagggaggcctttcagaggggatgggctgattgaaatttgactcgttggtaagattataaagccaaataatgctgacagggaggcattagagaacaatttttttaaaaagaaagaaaaaacaagggaaataaataaaggcataaaaataagaaataccttgctgagcatgaaaaatctcagtcaacgatgaagcaggagaggaaggcagggaccacatatttgatgtccttagtgattctatgaattattagttggtgttattaaacttttagtgtgcctgatttataaattaaacttaatcataggtatctatgtataggaaaaacatagtatatgtatagtgttcagtattacacgtggttttcaaaaatccactggggttcttggaatgtatccctcatgactaagggagaactactgtgcttttacagactaagatataaactaaatatcttttcaaggaatattttaggtagatctcactggtagctgtgagaaagaagatattgaggcaaatggaagaggaggcaaggtatagtgagtatgctagtatagtaattgaggtataagaaatgattattagaaaacaatgggagagtaggaaacattgcatcagatacacataaaaagagatccatgggaaaatattccactactcaggcccaagtaacagcagctctacaccaatatatctgaattagggacaggcatcttttctaagcctcctatgtaattatgatacttaataaaggttgagaagcactggattaggtaactacttaggagaataaataaacatgacttgactaattggagataagagtgaaggacaaagaagacataaaggattgttttctgggtcctagttggggaaaatctgctaattggtgatattattagaattaatggaggcaaaaaaatgaatttcttgaagggaaaaaataatgcatcccaaatgtgcatatttagtttgaggtacctgtggtatatttgaatgttggtggtcagcaagtaagtgaatacaaaaattcaataatttgcaatttgatataaaatatcaatagtttggaagagatatacaatttgaaggtggagatttcagagtcatcagtgccttgaggaggctttaaaacattaaaatgcaaagtattctttagggagagtgtgtgggatgagaagagtagaggattaataagagatagctctatagtatgagtgtttcagagatgaatagaggaaaactagccaatgaaagtgtccggaaagaattctaaagaaattcggtaaaaactagaaaagtgtgggatgaaagaagaagcaaaaagatgaggaaaacctacacttcctcatgaaagagcagaaagagtagattttcaagacaatatcagatgcagcaaaaagatgtactaaggtcagagttgaaaatcctttaggagtcttagaatttagagggtcattagttacctcagcaaaggcactttttagtgtgcagttgctaggttgaattgtgttgaagggtaaaagactgatgagaagtagaaagagagatcaccaacttctttgtaaaatctgacagagaaaaatgaataatagtgtgatggtgctattgcagttggagatggaaaatatgagcataatttatatttggtagtcatcatttagaagtatgttccccaaaatttgtactaaccagttcagcttgtactctctggttagttgatttgttgattagtttagttcttttctgatttatacattcattcaggagaaattcactaataatatttcatttctaagatattattctagatggtttgtggatgataaaaatatagaacaagatcctttcttttatgtaagatagtgttgtataagaagatttagcatctataagagatttgtgcaatgtaaaaggtcgtaaacaccttaaggctagtataggcacagtgatatgaatgctccttcaatcaataccaacttattgagctctattataaatgagggattgttgctaggttctggctactcacaatgcagtccacacatttgcagcattgaccatccctgaaatattttaaaaaatacaaaatctcaggtccaacctcagccattctaaactagaaccagtattttaatatgatctttaggtgattaatatgcacattaaatcttcagaggcacaagcgggtttcaatttattctgaaagtggaatatgagaacatgtaaatcagaatctctttagaatacaaattctgagatcctgcacccaggaggtctgtttcaatagttttacagtgaggctttgattctacattgaaacaaaactatacccatctaattttttttctgaaacaaaactatacccatctcattcagtatgagaaccatttatttgggtgttggggatacaatgatggataaaacagaattcaactcttttaaaatctgtcttacgtacaatttccagttgggtacaaataaatttctctcctatatgatggtttctaggatcaatgtcttgaaagactgtctatactctcaaaatattttatttttcccatcatttttccaataatagggaaaaattaaaggattctgacacagtgggtcagaaccacatgaaaatcaaattgagattcattctccttctcagaaatttcagaggactgataaataaaccacctactgaaggctaaattatatttagtatacattcagaaagacttttgtttaatggcagaggcattctttaagaattggtaatccctatggatatgtttgtcaactctattaattatattatttgattaactgaaacactgcaatccctggtcactccagataacaggaagcttaaatacttccatatgtgctatatcattgataaaactatgatgcttctctgtaaataatttgggaaatattcttacctttataaaatttttccaaacaaaatttattttggagagaaaaagataattttatgtacttcacaaatttgattttgtaaatagtaaccagttgttacaggccatagtcattgaaggtctgccttatgttaaagccataatactttcaatatcattaatcaactgtaaccccagatgaaaaatggatttaacattttctcaaatatactaaaggaactaattaatatcggggcttatgctacatagacatgaatgctttggttgagtagtgatggatatgttggtaaaaaattgaatcttgttcagataaaattttgcttgagaactcttgcttatgaggtctcagtagataaatttttctatttactccactcagccctatttatatgttactttgggctcccaaaacagagtccgattaatggatggttcaactgggtggtttcctggaggaccaatatattaaaactatttaaaatttttaaaaagttaaataatggcattagataaggctcatagggttagttaactcaggttttgcacataattccatgcagaaatggagaaatgtaagtgaatcacagtcttacttcaacacccagcattctcaaataacattgcaatctttatcccttaaagtacaaagtaagcagatagtttattttaaccaggcttagaattttgtttagctgtccaaaaaaagagacaagattgctaagttgcttgtaagggaaacattacagtgctgaacagtggaaatttggcagagtaaacatgaaaataagaacacatagtagttgattgataatgaaaatatagtcagtacagtggattggaggtttctttacttttattctcatgaattattggagaatactaaaggaagaagatgatcacagagggacatgtttgagaaatctgatgtcataattgaattcgtaatgacaaggacaaatgaaagtgagtcaataaagtgaattgaggtgaaaggcttttgtagccaccaaggtcaaacagatgagagggattacactgagaggagtagtggtaaagaaagctagtgagctgaagacagatgctatctataaatgggggtgtgagagagtatggcagggtagccaggagagttagccaacattagttaatagtgggaaacctttaaaaaaattgtatgaaattaaataattgaaccttaaaggtgctagaactttaaattatttgaacgttgagagagaaatgtggctacatggcctgagtcacagagcatacagctacaacttttgcttttccccataaatgattaggaaaggtcttgaggtgtcagagatagaaactctcagatcattaaccctctggaatgttagagcaatcttccttggaatgtagcaagctataaccaatcaaatcaatataaaatatatactgactttgtacggaaaatggtgcagccctcttaacggcctatataagtgaaacaacttccccacttcggaacactgatcccattcatttgaagtttatgtttcctgggggacaattttcaagcttttcattaaaataaactctatacttaatcatatttcctgaatctcattaggtaagtttgacaaatattttcaaggagtaaagtaagaaggacatccaattagaatgagaaacactgagcaagcacatggaatgtgggagaacaaaccaacctacacttgtgagtaatgcaggggaagtagagttcttaaggccagtttgttttaattttcagcaagaaggcaaaggtactgttcatagaagttgtgtgagagtttgtggttgttgtaacactgatgcctattatggactgagctgtgtctcccaaaaattcttattgaagaagagttgaagttttaacctaccatacctcagagtattatggcatcctgaaatagggcctttaaagagataattacaataagattattagggtaggaattgatctgactggtgtttttataagaagagaggattagaacaagacacacagaggaaagattatgtgaagacacaggaagatgaccaccatctctaagcaaaggggagaggtctcagaagaaccaaccacactgatgacaccttgatcttggatgtctgtcttccaaagctgtcagaaaatacatttctgttatttaagcccctccagttttttgtactttgtatgtcagatctggcaaataaacatcatgccaaagactcagaataagtgttttggacaacagagagaaatggaagtggatgtcaattttggggctatatgtggcacaagagacgaggtgttagtatgatgtttaataattagccacacttattatcatgatcaaaatgtacaaatatagaaagcaagattaaattagtctagatgggaaatgcacccatacagcttactatttccattaaaaggactttactcttgaactgtcttcggaaatttaactttactcttccaggatactcctgctcaggaagatcaaaactgaaaataactttattatttatttcagacactttctgaaaaatctataaacttgttttaaattcatcaaatgatgtttatctcccagtactctgaatctcttgacttctcaaaacccccatcttgctgtgtccgccaatcttaaactattgtattatgatcctttctcagtttaataaagccctgaaattgaaacacccactataaactaaacttcaaaatctcatacatatcttgattttgcccttccccctgagatactactaaaactccatgctctcccttactctagtgagaataaactcctttctgtcttctcaatatgtgattttagtgatatttgggggatgccaacattctataaggttgtagttattccatatcttaggctggacgttctcttggctgagaaggggatgaatggattactgaagggtatcctttgaaaacctcatagtggatgcttttgccagttattcagattattttagcaactgggggcacacaactactaaaaatctcagatcaactgaatgctgattggaagagagagttgactcacagaaggttgctgaccccatacatggcaggaaacataatttaaaagattagaattcagaaaattggcataaaatggggaagatgggtcaagccaagtgcagatggattgatttggatacaaaaaattgttgtgtgtggacaactatataaaatgcattttgatatttgcaatatgtacattacaaagcaagatacttcatactataactaaaaataatacaatttcaccaaaattacgtatcaattttgagactataaacacctaacaaaatactgtaagaataaacaaagcaacacctaagagaattaaagtgagaaattaatgaatttttagcacattttatttagtaattgacaggaaacacagacatacacatctgcaaaacagacataagaaagaagaaatgttctacataaaatactggcaaacaacaaatataaaaagtagaaaattttccaaaaaaactatttaaaaagatgaaatgcttcaactgctgacagaatctagagaggggtttagtttcaaaaactacaattacaaggagttaagaactgtgactttgtggctcactgacccaaccctcatggcaataatctgcaaacattatgagaggaaaccctggcagcttgtttggctagagatacttgaagtcagaaattcagagattggagaaagctgggaatagataagggaaatctttctagcacgattatctcaggagtgagactcaaattttaggataaactgctcaaactcctggctgacaggtaaaaaataaaataaaataaaataaaaaattttaaaaatacaagtacaaggagaatccagaggcatagcagaaaatcaggtaaagaccagagataaatcttctcatgacagaaaatagactatccaaataataatattaaagtgcgaaggaaaacactatgaatgtagaatcgtatatgcagatgttaaaagactttccctaaaaatgctgagatgtattgaggaaaaaggaagttgaaccactactaatttatccattttaatttcattaaccactttttttttcatttctggaaattccttgggtacagtttaaattattctattcttttttaagggtatgtctttcaatttgcataatttccaatgttttatacttagctatacttatattatagtccttactcacattggatatatggagccagatacgtgagcgaaatgcttttcttatctgagcatattcttcagccatgctcagtttaggcagcttggcatgagagaatagagcacatagctggcagagcaactggaatttaaggagatattcacataagcaaagagctacagtgaagcaaagccccatctctgctcaaatctttggcatagagaagtatcacagggagccaagagaaaaaaaaacaccatctagaaggcacgggaacagaacaaatgtatcggcagctgcctatcaaggaaaagatcacttgcggtttgaatccaggtacgttagctctctactattacaaaaccaagaattcgtgaaatcaaaaaccagtatcatgtattacttacagtgtccacttatcaacaaaaatatatcagacatgcatataaacaaaaaaaaattttaaaatttgaacaaaatatagataatcatctgtatgtactgcagagtaaccaccttaagcatcaagttaacacaatgagaaaaaagtctatacaacaaatggtgctagatcaattgcctgctcccttgtaaaaactacccccaacccccacctcatgccatatacaaaattactttaatttggatcatagacccaaacctaaaagataaagccataaagcttttagaaaaaaaagtgacctcagcttaggaaaagatttcttagtacgaaaaaagactttatcagaatttaaacttctgtacatacaaagacctcattaagtaaatgaaacataaagtcacaggcagaaagtatttaaaatagatatctctgacatataattttatcttatattcatatataagatacttatatatacctattatatatataaaacctattatctatatatacctagtatatatgtaaaacctatcatatataatacctattatacatatatatatacctgttatatgtataataggtattatataatacctattaatagatatataatgcctattatatatataaaatagatacctattacatgataggcattatatagtatatctattaatatagaaataatttatatataaatatataaattatcttttaatagaaaaatacaatggctagtattccaataaaaaggataaaagatttgaacagacttttcacaatagaagatagacaaaaggcaaataaactcttgaaaagttgttcactgtcattagtcatcaaagaaatacaagtttaaaggatgagataacactatacacaggagaaatgcttacaattttaaaatgctgttgatgccaaatgctggtgaggaaaatataaagctattgctgttggaagtgtaaaattgtaaaacaactttgccaaacagtttaacagtttcttaattagttaaacgtacacgcacatcttggcatagaaattccactaccaagtgtttacccaaaagaagctaaaacatatgcccataaaaggacaagactatactttgcagctttaatcatataattccacattgaaaatggtcaactccgcaatgaaaatatgtccatcaaccaggaaatgaatagactactgtggtataatcaaacaatggctactacattgcaataatatagatttatcaagtgaaacatgcataacaaactgatgaatctcaaacatatactgaaaggaataagccaggcaggaaaaatttgtactatatgattccattcatatgaaatttgagaaaaggcaagattaaacactgatgcttcaaataaaaatctctgttacctttggggtgtaaaggaactgatggaaacgggcacatgagaattagctggagtaatgatgatattttacgtcttagttgagatggtgattacataggtatagacaattagttccttgactcacggaactgaatataaattttatgccaataaaaatagtgtttcttcatgtgtctgtaaaactcttacctttatttaacattttaaaggcttagagtgtcataaatcctatctcactactttctattgcttggatgtattatacatggttaaagacaatatagaagaaaagaaagtttctttggtttctttggcttttcttatttttaaaatattaattttctttgatggcttaaggccaattagtcttttcttcttgctatctttttgcatttgataaattcatttttattttttaatttttgtgatatataagggtatgattcccagtaaatttcctccattatcttcaaggttttttcttatttaatttaataacctgctctagtacccagtggttcccttcctgacccttactattaattcatcttagaaaaagtcactgatacctactgattgctgagacttgagcccagagtggttctgactgtaacatgaagaggatattcagtcttagttcccacattcatgggtgtctcaaaatagtcttggagtcatttggcctggtaatctgcgtgtctgaaatgagcctttgtagacttataattttcagatcactttcatgtattatatttccaccatataacttcactctgcacagtattttttttattttctatttggccttacctgagggtcagaaagataaagtgacttattttttcaaatagcacagtgctaagacttcttcactttagtcaacaaatatttgttgagtgcccactctgtgtttcacttttccagcaaatgagacagaaaaggaatctgccttcacgttgcagttttctcccgattattgctactttagccttgtccataagaatgtgcttctgtcttgagaactccaacactatggttgctttctttttatctttcacaatcccaaactaatctcttggtctattgtgctgagcctacatgcctaacttctgacgcccaattcatcttgcacaggaaccaaagcaaattaaactaccaaaatgctcaatctgtcagcaaaaccatgactggccacctcctattcatctaatcaaatattcaaatattccacattgttcccttttgacaggaaagctaatctaaatactgtgggtctctctttttcatcaaagtagtacaccagtactctatcaatcactacattattttactttttttaatagctcatacaacttttaatttacatttgtttatcagcctttccttcctagtacatgagctacatcagagtaagtctcttttctgttttattcactggaataatgacaaagacagagtgaacaagataaatatgtaataagtacactaaagagatcgtagtgctgttgcaaactaattatttgatggaacaagaggctgtatctttctgagtctcaggtacctaaaatgctaaatgagaataatcaaaataactgtgcatagagagcttttaaacaaaaaatatagaatatgaaaatgatttcaagattatataatttctagtatatttttattttaagttacttttttggtcccattttgaagagcatataaattgaggtgctaccctgaagttgctataaggcaatcaaaattaaaatctgaaaatagtaatgatgttttaatattcacttatactaaattggtacagaattaagaaaacatactgtacttctaaatatggaagaatttagcttgttcaggcagtcaggaagtggaacaacttcaaaagttgaaaaaccacagaaaccagtttgttttctccaaggttaacttgtcaagttctgagtgaatgaagatttcagatctagcacagcctcccctgcttaaacataaggctgtacccaagatgcgtggtatccagggtgagcgcagactggcctggatcctaaaatgatactctgtcttaatttccattgtctcattactcaactatcagaaggttctcaggagtaaataacctaatatattaattgctattcaggtgcagatgactaacaatcactcttctctggtctctctttcctttttccctgggatgggaaaaaaaagtacctgttaaaccaagtgaacaaattgtacaatagcagttggtaagggggactgacataaaagaaatttacagaatggaaaacttactcttagaactgaacaactttagagaacatttagtctattaacactaattctataagcaaacagcaactaatgctataatttactgagtatttaatagtaattgtcttctcaacatcatctgatctgttcaacatgtatgcattattatgcacatttcgatggataatcacgttaaagtcacatagtcaaagtcacaaatgcgaagtttcataactcataagcctagagttgggattgaagcagaggtcttaggtttgcattcttccaaaatggaaacgtatctgcttaaagattccaaaaactgtaacattgattcttctgtatctggatagtaaaatattggtttttaaaatgtcaatatcaatatatgaccaataagacttggaacagtttgttgagtaattttgagcttttggcagttgctcctttgggatgcatttttcgtatcatattgactcacatataagtcttcacaattttgacccaaataaatattattttcaaaagtggactttccctagagtaaccctccattggtggagttttcagtattcgaaaatctttaggatgagattaatgatgtcggtcactctgcatcataaagttcttatgatttgttcagcaaatggcagtttttaatgagctcagttgcctcaaagataaaagtgtattaaggtatgcaaaatgataaagtgttcattgtacagcactaatcatattggcttaactgttaatgtggattttacttttattagactttagtggtaactgaatatttaagtgtttacttagcctttccaaaatcatagatctgatgagaagatagtgtctttaaacctagaacttggtgagagagtggaagtcagtataaactacactcaaaagggaaaattcctatttctcaagcctacatttcttgccaagctttagcaggtggtgaagtcagacagagcatgaataacataccctctatttatggccagtcttataattggaaggtagcagctgccatctggcataattttggaaggtgttgaaaggtcaccatgatcaaaatattgttaggtttctcttgtactttggagtcaggtaatatttattgagctataactatgtgtcaagtattctcctgggggctttcacgtatgttaccttaacaaatatcttacacaaaccctattttaatcttattagatcaacaaactaaggcttggagaaacaaagaagttgctaaaggtagcctagacaatgcataggcaaacagaggtttaaatacaactcctctaactccaagttttatataaggaattcttactaatgtcctcagtattcacaggtcttcaagagacagatgcattttagccagttccctctacagcaatacccagaaagtagtgtcaaccagttattatttcagccctaaaaaaaagtctggtaaaccaaggtacattatggtttatataagttctatgtataaaacctaaagggaaatattgataaagtaaaacctcatcaatgatggaagaccagtttaatgaacaaagtccaaactattaaatatgtgatgcatttgaagaaaataagatgcggtgcataaagaaggctgtgagaaggtccatgtatgccttcaggcattttgaagaagtaaaagaggtatatttttatgcgttaagatgactgaacagagtaatgcatgattagagatgtctgaaatagaatgtagtttcctaggaggtggtaactgttttacagatgtccaagaaaagggacaaaaaatgtttcataacaatgtggaaggattctacaaacaatgcattggttgtgttaacgtaactttaggttctcccttcaaccatgagactctatgataatgaacagtgttaaatgcctttacgtgaagttttgtaaagcttacaacagaagataaaatataagagatttaaaaaatcttcactgaagatagtttagggaaacttgaatggcttaatgaaagtgaggccactcattagagctggcttgaaaggcaaattctatgtataaaatttgcaaatgtgattcaagaaccaactggagttcctgatcaaaagaattcctgattctctttgttcatggagtctgaaatttcaacattgcagacacattcagttgtctcatagggtcattgatcttcatgatttatgttaaaatgaatatacccctcaggggggtgacaccacaagcccttatcaactagtattttggaggagtatgacagctagatcagagtccaaatctgggtgaatatggcagaagattagtgttgcagcctatgagaaaagggacaagaaagggagaaaaattagaaaataattgggaaaacagagacagaaagtcagaaaggcaaagcttttagaaggacttcagggattattggttttcaatgactcttttaacatgagctcttcttaacagccacctctgaaactaactacatgcatactcccccacacacattttatacaatttattatttgtaatcacacctacactttctcacagagttaaaagtatgcttaatttctttgaaaaatgattttgaaatattatctatttacaaaaaaagtagaaaaaatgaaaattgtttagtttgatagatttttataaagtgaacacacatgcataaataacacccagataaagaagtataattgtaattgtatataaaaatcccctctaatgctctccaaattactaagtccttttcctctccaaagggactatctttctgatttctagcatttatacatgagtttggcttattcttgacctttctacaaggggcataatttgtcttgaatttggcttctttcactcagcaacatgtttgtaagattcatactgatttaatcaatatcttatttatttattatttctactttttgtgattagatttgatgtatttccaaataaaatcttagcagaatcgtctcttttaaagaaattgagaagacatttataaaatttatttaaaactcttcccagcgtaatgagtacaaaaatacagttagcatgattaatatctagtatttggtatcacagtaaggtaactaactaataataaatttaaaaataactaaaagagtgggaacagaatcttctaaaagaaataaatgataaatgcctgaggtgatggatatctcaattaccctgatttgatcattatgcattggatgcttgtattaaaacatcacatgtgccccaataaaaatatatatatttacacataactatcttggacccaaactaatttttagaaaaggaaaataaatatagaaaaagtcaaatgaccaagactggccaaagcaaattttgaaaaagaagaatgaaattagaatactgattccatgatttaccaaaaaattatattgcttgaggtattagtgaaaagagagattatctatgaaaaagtatttagaataaagaaatactcccaaaaatatatagtcaattgacttttgacaaaagtgctgacgaaattcaatgaagaaatgaaagtcttttcaaccaatggttcagcaacaactggatgtccatatgaaaaaattatctttagttaacttgagttctttcttgcaccataacaaaacttaggtcaaaatgtaaaagctaacactataatacaccaagaaaaaaaaaaaacagaaaagttttggaaccttgactagggaaatatttatcacctaagatatacaaagcatagaccataaaataaagcttgataacttgtgtaggtattgaaatataaagaaaatagaagaaagaagaagaaagatgaaggaagaagggaagaagaagaggaggagtaggaggaagaggatgaggaagaagaagaaataaatgtccaaatgatacggtttggctatgtccccacccaaatctcatcttgatttatagctcccataactcccatatgtcatgggggcagatctttccagagcttttctcatgatagtaaataggtctcacaagatctgatggttttataaaggggagttcccctacacaagctctcttgcctgctgccatgtacaatgtgactttgctattcctttgccttctgtcatgattgtgaggcctccgtggccaagtggaattgtgagtcaattaaacctctttccattataaattatccagtgccgggtatgtctttattagtacatgagaacagacttatacagtaaattcatacctgtagagtggcgtgctgctgtaaagatacctgaaaatttggaagtgactttggaactgggtagcaggcagaggttggaacagtttggagggctcagaagaagataggaaatgtgggaacatttggaacttcctagagacttgttgaatggttttaaccaaaatgctgattgtaatatggacaataaagtccaggctgaggtggtctcagggggagatgagaaatttgttgggaagtggagcaaaggtgactcttgttatgccttagcaaagagactggtgacattttggccctgccctagagatctgtggaacttggaacttgagaaagatgatttagagtatttggtggaagaaatttctaagctgcaaagcattcaaaaggtgctttgggtgctgttaaaagcattcagtttcatgtattcacaaagatacaatttggaattggaacttatatttaaaagggaagcagacattaaaagtttggaaaatttgcagcctgatgatgcagtagaaaagaaaaacccattttctaaggagaaattcaagcctgctgcagaaatttgcctaagtaaccatgagttgaatgttaatcatcaagacaatggggaaaatgtctccaaggcatatcaaagacctttgtggcagccccacccatcacaggcccagagtcctaggaggaaaagatggtttcctgggtggagcccagggaccccatgctgtgtgcagcctagagatttggtgccttgcatcccagctgctccagctgtggctaaaaggggccaaggtacagcttgggcatggctttagagtataaaagccccaatccttggcagcttccacatggtgtttagcctctggatgcacagaagttaagaattgaggtttgggaaactctgcctagatttcagtgaatggatggaaatgcctggatatccaagctaaagattgctgcaggagcagagccctcatgaagaacctcttccaaggcagtgagggagaggtatgcagggtaggagccccccacacagagtcaccactggaacactgagtagtggagctctgaaaagaggaccaccatcctccagaccccagaatggtagatccacttacagctttcactatgtgcctgaaaagccacaggtactcaataccagtctgtgaaagcagccaggagagggctgtaccctgcaaagcaacagaagtggagctgcccaaggtcatgggagcccacctcttgcatcagcgtgacctagatgtgagacacagagtcaaaggagatcgttttggagctgtaagatctcattgccccaccagatttcagacttgcatggggcctgtagagccttcattttggccaatttctcctatttgcaacaggtgtatttacccaatgcctgtacctcctttgtatccaggaagtaactaacttgcttttgatcttacaggctcataggcagaagagacttgccttttctcagatgagactttggactgtggacttttgagttaatgctgaactgagttaagactttgggggactgttgggaaggcatgattggttttgaaatgtgaggacatgagatttgggaagagcctggggtgaaattacatggtttgggtgagtccccaatgaaatctcatcttgagttgtagctctcataattgccacatgtcatgagagggatctggtgggaagtaattaaatcataagggcaggtctttcccatgctgttcttgtggtagtgaataagtctcatgagatctgatggttttataaaagggagttcccctatacaagctctcttgcctgccaccgtgtaagacataactttgctcctcctttgcctcctgccatgattgtcaggcctccccagccatgctgaactgtgggtcaattaaacctctttcctttataaattacccagtcttgtgtatgcttttattcgcagcttcaaaacagactaatacaccaagcatccacctaggcaaggtgggagagggaatacttgcaatatatatatctaacaaagaatttctaactagaatatataagacatttttcaaattacttgtaagaagatggcatattataaaatgggcaaaaattaaacactatacaaaggatcatatataagcagtaagtatgtgaaaatgatgaccattattcactgtgacaattcatgttaaaatctcatagatattgcactacacatccacgaaaagagccaacaattaaaagactgttatttccaagtacaggagaggatgtggaagcatgctatataataagtaacacagagaaaaaaaaatacaatactcagctagattagctaattttagctaatgcagatctgcatatataaaattgtatgtgcacacattagcttagatatgagttcacaggtgataaagcaatgaatctctaatagttttagcaggaagtggatgtgaaattatgtcagaggtagagaactaagacttgtttttcatagaaaaatgcatatgaacgtaaaagtatatatgaacattcttgtataaataagcagttcttccaagtttttttaagtagcaaatgacctttttgaatgttttactttattttttgattgaaaaataaaattgtatatattcatcacatacaaaactttttgaaatatatatacacatgaaatggctaaattgggctaattaacatatctgtttcctcacagttataattgttgtggtgaaaacatttaaactctactaccttagcctttttcaagattacaatatattattaactatagtcatgatgttgtagaatggatttcttgaacttatcacccctaagtgtccatcaacaatgaatggataaagaaaatatggtatatatacacaatggaatactattcagcattaaaaaaagggaattatatcatgcactacaacacgagtgaacctatgttaagtgaaataagccagacacagaaagacaaatgcctgattattgtatttatatgtggaagttgaagaagttgaattcacagaagtagagaatagaatgatggagataacaccaccaagtgctgggaggaactttgataggtccagaagcttttaaaacgaatttttatattaaagggctaggaatagagaactaggaagaaaacaaaagagagcattttttttttaatttagacacattacttagcaaaatagtaccgaatttttctatagaggtccatatatcacagtaaccagaagcattttcattaaaaaattctccatagacataaaacagctaaatataattacagttgtagaataatgccatctcaatcatttccccatttatttgaaatttgatttaacagcaaaactcaaagggggcgtgagggtgaatagctagcaaaagaaatttctctgcgggaggcaatcatcaaaaaaacttgtagttaccagttgttccgccctacttctcatattctcatttggctttttgcccagatttgcataaatcactagtaatggccaaaacaattcatgaatatagaaaaaaataacaaataaaaaaatggaggaaggaaaaaataaactcatgaaaaaaaaaaacatcagttcttaattattggaacactaatgaaaacagtgaatcaaataaatagtttgttctcaaagtgttgtcatgcaaaacacaataaacatgaaagttcctgaaataacacttcatagcaagaggaaaaaaatgccctgtaacagtccttgaaagaaaaaattcattagtatttcactttatcattcctggtttcaggttccagtctaatctccatagaaatggaattccgattggacctcagagatatcttacaagtacactgtaatcccaacttgagggagaagttcgagttaactgaaattcagtttaccctcatgggagcagttgggctgaactactaagaggaaccaaatttaagttcttaaaaatggccaggatgaattctaaaataaaacaacagagctaatattaaaatataaagaaaaatccttctttctttctttctttctttctttctttctttctttctttctttctttctttctttctttctttttcttttctttcttctctttctctttctttcttcttcctttcttctctctctcctctttctctttctttccttactattttttttttgtttttaccctgagcagcctatctctctctttttttttttttttcacaaatgtgaagtgattatgagaatgcagaggaaaaaaaatgccggtaaacaacaacgagtaaatcatctttataatcagtaaaacacatatttaataacaattctaacacaaggacttatgtgcctaagatagccacagatacccagtttataattttattttagccgacattaggttctttatgattgccaataataaaccattgttctaattttgatgatttaatttcttttttaaatgtttgtctttttttactaaagtataatatttttaaaactcatttaaagaaatttggacacattgtttgatatgacagtcctttctttttttttaaattttctatagaaattatctcttttccatttcaaaatatctggcactgagtaagttttttcttacacagttcaagatacagtaatacagtcagcctgagtacccatattacctcgctgatctttaaaatacttctatgcacttagaatgattttaaaaatctgtttttactgtttttggagtctaatagagtggagtttaagtagtggctttgtcattttttctgggtgggttgttgaatcttttgtagtactgtttcctcaatcatgaaataatttggaagtgaagatcgaatggtaggtataatgtatgtgaagctcctagaacactagctgggagacacctctttaaacagccgtacgccacagcccttctcttttgtgggattggctttgaagacacagaacagaactttgagtggctacttcagtgccatctgatcttgctctgggtatagttaatttatctggcttggatctgggccaggcagattctctgtctaagaaactggaactgagaatagagagcacaaagcttgggaggttctctgtctgagtcactttacatgaagaccctccagggagaagtagtaggtcttgctgctgaggctcccagaactggcctagtcccttcccatcctgatgctttgtctctgatcttgtaataaatcacaattatcctgccccatcaatatgtatgttttgccccctccttttattttgccttaagctagaaaaaaatgcaggtgctctaaatgaatattaactgacatttaaatatgtatggaagagtatgttgtagaaacagaccttcagtgaaatgtgggctatttagaatcggtgatgattatgtgaaaggccacaagactatcttccatgtaattggaagaaagctagcaacctagaaacagttcattacagttattaccaagggataaagctctaagagagttgatcccttggagagagaaatgccattcttgaaggattggatggtcaatctgatcctgattgcattgtataaaatgactgctgaaccaatgttctattgctttttttagcagttaggctatgatccttgaaaactaaatacagaaatgtattcatttagtttatttgattgctttaacttaataaatgaactatcgatagttataaaacatatattgtgttattggtcaaatagaattagacttttgaagattagatgaagaatttcttatatgcactcagagactgtatcaacagtcctgctgtcctacctcccctcatatctatattaagtacttaacttgggtcactcttattgaaggaactaccaaatcaactgatgcctcacccctcattgtcatttgttaagagattattttcaaaatcgctctatctggaaatataatgagcagtatcagaataacgatcaaagtgtttacatttgtaatttaccaaggaatatcataaaactggtagcagagtgggtgggaagttagaatcagtgcttagagattttgaagtatcttaaccaggaggatggaacatagataatgactgcatttaatgtcttacattgaacaactatctaaccctttaaaaagtttgctaatgcaaacatgaacaccatgcctgattgttccccatgttattgattgatcagatcatcgttacccaatacagagaaagggattaaaagatttcagagaacaaacatgtttgaatgagtccgccatgtgcttcctgagccactcttggcttcagaacatactaggaagagaagtgcccagatcttctaaaaagcctaccctagttcttctggctatatgcctgtcctgaaaaggtcaggcatatcagaagagaaaagcttcaactgagtaagattgttgatctaccactgaatataaggtgctgtgtgcacagggtccacatggcagtagtttaccacaagtgaaaattcagcaacgtgaatgtggtacctggtttgggaaatgattcaatccatcctatcaaggataatatgtatcaatgtattacaaagtcctgtcagttctttctgcaaaataggtccctcttgctaccacatccaactctactaacctagtgcaagcaatcattatattttgcctggaaaactgcaatgcctccaaaccagtttctgttttcacctttctccactataaacagttactaaggaggaaccagaatgattatgtaataacataaatccaatcatggccaccatctgagttttagttgcatctagagtgaaaccgaattcctttaaaaatatttcatgccctcacctgtcccatatatttctccttttacataaaatattattgaatcacataattattttgcctataattttaatttatgtaattttatgtgtattcctttatgtgtgtgcgtgtctgtatacatattttgagtgggcaaggtataagcttggaagcaatatccaaaatacatgtatctggccaaagacttgtgttcagataatacaaggaactcctagcgataaaaataaataaattacaaatccaatttaaaaatgggcaaaagatttaagcatacacttcccaataaagcatatgcaaatgtcagtaaacaaatgtaaagttgttaaatatatttggtcctcagagaaatgccctcaatatggtaaaacagattaataatgacaaaaaatttaatagcttaactgttctaagtatctggacattttatacatgccatgtgttacttatggccctaacaagcccaggatcaaggaagatgtaaaacagctcaggcaaaagaagcatgaaatggtacagagcattggcttcaacaaaagacttatgtaagttcaagcagaatgtcctgtgggttctatcaacctgctgtctgaaggaatttattccaataaagcttataactagctcattttccttttcctctaaagcaaaattttaagtgttagcttttgtgcttggcactggaaataaaaagatgaataagactacatgtgatttccaagagtttacagtaaatgtaagaaagagagctgcttaaatgataaacatcacatagtatgggaagtacttaaacaaaagtttgccttaggtgttatgggtctacagaggaaagaactgactctatctgggtgagtctagaaatactttgccaaagagaaaacatctgaacagaattgaatgataattaggcattgtccacaaagagaagagacaaaaaaccattaaggcagtgaaactagcatctcaagtcatagatatgtgaaagaccatataaaggcattaatatggtaaaatatagacattttgggcgaggtagaaacactgtggtaaatggaatgaaaagggtaggcacaagaagagtcatgcctatttgtactgtctggaccatattctccagttaatgatggtttcagtatgggaatattttggaaaaattgatggtttagaacttgtgatagatagaataatggcctctcctcaaaagatgttcacccaattctcagaaactgaatgtgttaccttacatggcaaaaggactttgcagatgtgattaactggaggattttgaaatcagaacataattttgaattatctggatggctctaatatattcacaggtcctaaaatgtggaataagaaggcagaagagggaagcaagagaggtttgactacggaaaaggaagctagactgttgcaatgtgaagaagacttaatatactattgctggctgatgcaatgtgaagaagacttaacttgctattgctggctttgatggtggaggaagagggctactagtccaggaatgtgcgcagcctgtagaagctggaaaaggcagggaaagcagtttgtgcagccctgctaacacgttaattctaacccagtaagaactatttcagacttctagctttcaggactgtaagataataaactgttgttgttttaaatcattaagtttatagtaatttcatacagtagtcatataaaatgaacacaaatatatggagatgaaaggatattgtggataagcaaagccctccctggtttcttcttggatatggctttttccatattttagactctgtggctgaaaacaggcccttgaacactgtccagatacgggtgtttattatagtacaataaatgcaagaagaacacagtctttgaagccagatacacctgagttatcacctcaaatctgtcatacatttactctataagcttaggatacataaagtacaatgagctgagacttgttcaggtttctcacccacaaaataagaaggatagtaattctctcattgagctgctgggacacctccgctaccataatcatcgctattcccaccggcgtcaaagtatttagctgactcgctacactccacggaagcaatatgaaatgatctgctgcggtgctctgagccctgggattcatttttctcttcactgtaggcggcctaactggcattgtattagcaaactcatcactagacatcgtactacacgacacatactacgtcgtagcccacttccactacgtcctatcaataggagctgtattcgccatcatagggggcttcattcactgatttcccctattctcaggctacaccctagaccaaacctacgctaaaatccatttcgctatcatattcatcggcgtaaacctaactttcttcccacaacactttcttggcctatctggaataccccgacgttactcggactaccccgatgcatacaccacatgaaatatcctatcatctgtaggctcattcatttccctaacagcagtaatattaataattttcatgatttgagaagccttcgcttcaaagcgaaaagtcctaataatagaagaaccctccataaacctggagtgactatatggatgcgccccaccctaccacacattcgaagaacccgtatacataaaatctagacaaaaaaggaaggaatcgaaccccctgggagtattacctaaatgaatgcttatgaaagattccagcacaatagctgagtgcacatactaacacatgttaattcttacttacctttcaacatctcacagtaaagttaaatctggatatttatgaaaatacgtaacagcctggatatatatgaaataacaatccaggctgttcattaagataatgagcaattgatgtaaaataacaaggctagcagagatggattaaagaaataatctggaatttgatggtaataatatacgaggggatagtattgtgcacctccacaaagaaacacacacagagaaacacggaaataaactgcatgattggatggatttggacactttttttttctggaaatgtgctgccatagagctagagaaagaaatgaaaactgaattgaccccctttccagagctttacaaactcactcaaatgtgtgggatgaatatgtacaaggcagttctagtgagatttacaggtcaaatctaaattcttccttgaggagcttggatttgttgtttgttttgttttgttatgttcacccaacagggatttatttttaacttcccttagttttgtaacagtatctcaggcaacagtctaggtttttaattaaaaatctcaagttggtatcccagctgaacagcttagttttataccactgaaccagacagaagccatggtggaatgcctccatccccaaagaccttatctctatggggtgctccacttgccatatgccacatcacatttttcacaaaggggtgctttgcttctatctccttcagacctaagtaaaaaatatgtttctatctttttgaggagcctatacatcttagaaaggcaatacacctaaagctaatcattctcaaatatttgatttattgatcattctaacaattgcacaagtaaaaggagaatgttaaaagcaacatcacatgtaaaatactaatattacataaaagtacactctcaaaattattttgtttcttttatacaacaaataaaaataagcaattactttttctattttacaaatgagaaaattcaatttctgagttttaagaccaatactgaataccttcaccctcataaacagcaaagcaagaacttgattcccactgtccaccatagctgagaactaaattctggccactgtaatcaaagaccttctttaaacttgtatattaatgctttctttaattacatatattttgtgaacattgttttctctaggataacatttaagtctcatgacaaaaataacacattttaatatgtgtgagtattcatttgtaaacaatgatttgaagtaagaagagatctgaatacttttctagactttgagagcaacttcgtgaataattatagggatatcaagtaatttctttgggtattttaattccaatttgtaaaatgagaagactgagttagggtggcttggctagttttattctttaaacactgcacattgcatgatgctcaatccttgtaacctattgttgagattcaataactagggtatctactaataatagggctaaaaaatttttatttccttttccagctcctatatgtttaagtaaatccttatatagacacagcattatttctatttttagagacatcttctttagcatcatagtatgaatgttatattgggaccactctttgatgtattttttttttcaggtaaaatttgggttttgaaaagatttttttcaaagtgatttttttttttttttttttgagatggagtctcactctgttgccaggctggagtgcagtggcgtgatctcagctcactgcaatctccgcctcctgggttcaagggattcccctgcctcagcctcccgagtagctgggactacaggcgtgcaccaccatgccaagctaattttttgtattttagtggagacaggtttcaccatgttggcccagatggtctcaatctcctgacctcgtgatccacctgcttcagcctcccaaagtcctgggattacaggcgtgagccagcgcacccagcctcaaagtaatttctataaattaagtgctattactattaatagggttattcagaggagatatacaaggtattctctactatcaataccttacaagggttacagaaaccatattttatataggtttgtgtatatataggaaattattagagaagaggggtaaaggctaaacgatgaactgatgctacttggaaataagaattattagtatgcttctcagttggaatatctaaaagacatctggagtaggaataagtatcattccaaaacacagtctgtttattttcaactaatggtttggtgggctaatagcaaaacagcttcacacatcgggactctaagaaatcattattttgtttgtctttattataagccatgtgtgtatttttatctccctttgttaccctcaacttgatccaacagttattttttatcacatcactgacacacaagaataccttaaggactatctttgaatttcaacctaaatagtagagtccccttccctgctagattatacattaactcatgcagttgtggaagtaaaatttattgataaaagagcacatttcagatgtagctagagtagtcagccactactatctgaatatcaatttccttatttaagagagtaacaataaagttagtcacaagtattaaacagttaattgttgaacacctgccactgaaggccttcctggggaatctcttgaagcttttctaaaactttaatcataccagtatgaaatagaatctcaggctgaccaagatggccaactggctagggtgtaccactttcatgaagagaaatagacagggtgagtaaatatagcaccttcaactgaaacatccaggtacatgcattgggattcatcaagaaaacaactcaactcacagagaacagagaaaagcaaggctggatgacatcccacccaggaataacatggagccagggagcctccttcatccagggaagtggtgagtgagtgagcaaccctagggacccgtgcttttcccatggatctttacaacccttctggacataggaacaggagaaattttagtgatgaagatggcacaagcagttgcaacaaaagcaaaaaatgacaaattggatctaattaaagagtttgtgtacagcaaaacaaaccaccaacagagtaaacagacaatctacagaatgggagaaaatgattgaaaatgatacatccgacaaaggtctaatatccaacatctataaggaacttaagcaaatttacaaagaaaagaaaaaaaaaacaaacccattaaaaagtgggcaaaggacatgaacagacacttctgaagaaaagacatacatggggccaacaagcatatgagaaaaagctcaacatcaccaatcattagagaagtgcaaatcaaaaccacaatgaaataccatctcacatcagtcagaaaggctattattaaacattcaaaaaataacagatggtgacaaggttgtagagaaaggtaatgcttataccctgttggtgggagtgtaaattagttcaatcattgtggaaagcagtttagcaatttcttaaagacctaaaaacagaactaccattggacccagcaatcccattacttcgtatatacccaaagaaatataaattgttcaataaagatacatgcatgtgtatattcattgaagcactattcacaatatcaaagttgtgaaatgcacctaaatttccatcaatggcaggttggataaagaaaatgtggtacgtatacaccatggaatattgtgaagccataaaaaagaacaaaatcatagtctttgcaagaatatgaatggaactagaagtcattatccttagcaaagttacacaggaacaaaaaaaccaaataccacatgttctcacttataagtggaagctaaatgatgagaacacatggacacaaaatggggaaccacagatactggggactactggatggtgaagactggcagaagggagaggttcagaaaaaacaacaaaactattgccttctaggctcagtacttgggtgatggaataatcagtaccacaaactcccatgacacgagtacttacataacaaacccacctctgaatcttaaataaaagtgttttaacttttaaacttttggtttgactctgtccccaaacaaatatcatatctaactgtaattcccagtgttggaggagggacctgatgggaggtgactggatcatgtgagtgggtttctccctagctgttcttgtggtagtgggtgagttctcaggagatctggttgtttaaaaatgtgtagcacttctgcctttgcttgctctctctctctctctctctctgtctctcctgctccaccatggcaagaggtgcttgcttccccttcaccttccatcatgattgtaagtttcctaaggtctcccagtcatgcttcctgttaagctgcagaactgtgagtcaattaaacctcttttctttacacattatccagtctcagttagttctttatagcagtgtgagaacagattaataaactctcatctcttattatttcttccaacaaatgtagaaaccactgctccagtctagacttctcagagatctcctattgttagtatcactattattttataaagccatttgaatcctaggtggttgataggatgtttattctaatttctttccccctgtagatcttctaggatttctaattgggtaggatggatttataatttctgtactggaaatttttccataattatgataaaacctgaaaaaggttgactaacttattctattcctatttcctcaaatcccgccagtaacttgtattgttgctcaagttatcattctgaaatgcctatctggccatgaccttaaatgtgtttatgtctattattgtttcaagagtattagtggaagttcctcaccttagcacaaatatccattcataatgaagttcttaccattatctctaatttcttcccttccacttatttttcttgcaggcttcatttcaaacatatgttgctttatgccattgtatctttatgcattttattccctctatgaagagtattcgttacttccttttctaccatttgacttccacttaactttacaaaacacttcactctgttaagtctaaattacgtgttgcaaaagcatcttgtgaattccacagaatgaaatacttttcacaccgtgcttaaatgaatcattaggttatttgcttgcatatttcgtaaggccacagaaccctgtgattgggaaatatatctcaattacaattttatcctgcttattcagaaattaatcaaactatagctttattttggtcagatcttgactttcacacctgcatataaacatttgcatgtgtgtgtttgatagacgactctaacacaacttgtgcaaaattgagatttcctttccttaggaaacagtattctctttctatatccccgttttatttttgtttttgtttttgttttgagacgaagtctcactctgttgcccaggctggagtgcaacggcacgatctccgctcactgcaaactcagcctcccaggttcaagcgattctcccgtctcagcctcctgagtagctgggattacaggcacctgccatcatgcctggctaatttttgtattttagtagagacagggttttaccaggttggccaggctggtcttgaactcctgacctcaggtgatccacctgcctcagcctcctaaagtgctaggattataggcgtgagccactgcacccagcctaattttttgtatttttagtagagatggggtttcaccattttggccaggctggtctcgaactccagaccttaagtgatccacccaccttggcctcccaaaatgctgggattacaggcatgagccactacacctggcctctatatccattttttaataagcagcaacagcatcctctcaatttacttagacagaaatttcaaagtcatgcttcacacttctgtgtcctcaccacagcctactccttgccaaattgtcacccttcatgtgtccttggatctccaaactcaagatctgtgcatccccactgccatagctttaggaccaggtgctgacaataattcctgaattaataatattctgaaagctggattctctgctcttagatatacctcctccaatctcctaagaaggatattcttaggatatttcataagacaaccaaagtgatcttcctaaagtacacatctgattgtatccatgctatagcccccaaattttgtgatgatcttctgttgtctttcaaacagaaagtgttcaagtggctcactgtgactagaaagagcattttccacctaaaacatatttacctcttcagttttatttttatctactttatgtataaaactattagcaaatcaaaatgaattccttgcagttttcccaaatatgttttctgtcacctttaaatatttgtctgtgctgatgcatgtgcctgcaaagctttctctatctctctttgctccactatctactattctttattcatacctcagttagatatcactcttctggaaagtttacatggccacctactgtgttatttccctcaatagtggggcagaacacatttgcgttggttcacaaagtaaaatattcaagaaccttgtgaacaggtgtcaaattactggtggtttgaaatcagtcatggtggaaatgtttacagtgtggaaattaacaaacactacacaaatcaggtttttaaaaaattcccccaagagccaattgaccagtacagtagtgtatctaattagaatgcagctgtttcactgcttatcttcattgtagcattccacattttatcttgtaattgtctgtttactagcttgtcttcccataagttgtaagatagttaaggatagggatagttcattttcttttcttttgttgtgttattaggtgtaatgcctatgtgacatacctgaatttctaccctgtcctaactctgcttatcttttagaaacaggacttctgtgatcaaaagtttcctttgtaaccaggccacctgagactagttagaaccaagatagccaaccgttgacttcaaacggacctcaggcttcattataatgtaatttccatgttaaatgacactcctaccagtgccaggatagttaacaattggcataataatgactgtaaggagccacaaaaagacaaaaaggagggcagcactctggttctgagaagtttacagcccatttccagaaaagccacgaatattcctcgccttgcttttaatattcaacattttctttagaggcattctgtattttaatcctctcatttttcatttgttgagaagttgatttgtgagccattctcccattttcagttccatggcaatcaaataaagcttgcactgtttgacacttactttcagtttcatgtgttggcttcatgacactgaacagggaaagacctcatctttggggaaaccagctttattggtaacattatcactatcatcgtgcacatagtagatcccaaattataatgggcgttaaatgagctttgtagatacaataacagaaaaaaaggattaccttctaatatggtactttggagcttatggttttgttctagttttaaaagagctttaccttacaaagctgggagcagaaagacagcttcagtgagagtcctgtggcatgtcagtactccttggctgtcactttggatgaccaaaagaatgtagcacaatgtgagctctttaaactttgtacagtataattattattcccaaaacaagtattacttttttaaattcaattcatcttcctaattttaggtaattattaggggcattaaaacctagaaaaacccaccacaacagtataggagttcagaaatcaatgtcataaaacgtgagttcacattattaaaggctaatgagatgactggggtgaatcctctgtagaggacagaagctcatcacatatttccatattcatcttatctcaaagcatgttagtatgaggtcacactatataggaaagtgaacagaactttgctagactaaagtagattattctttactccaatcccagtggcagtgtatttattttatatctaagcagttgctatttaataaatgtaggaaaattttaattggatgtcattttgcacagaagagtgaactctgtgattcaggttgtagtttgacaagtggtaagtaaatatgagtgagagtaagctgtcaagtatcttcttactacattcttcatatcagtaaagtggaacaaagtatgatgtttttaaaaaaccattctttatatacatttaatttagaatgccatcttagccttgtggacctcattctgagcatcaaggaaatctgcttttttggctattttatttagtattaaatatattaaatatatattttgggtcattttaccatataaaaagaaattgctttgtctaagaaatgtaatactttttcatctatgcttgtatcttaagtacatatgtcaaaatccaaagcatattttttctgtagctaaaatgttttaaatattgcaacaaaacaaattaaaccattctattttcaacttttatttttatttctatttttaatttttaaaatttttattttttttcattattatttcaacaggttttggggaacaggtggtgtttggttacatgaagaagttccttagtggtgatttctgagattttggtgcacccatcacctgagcagtgtacactgtacccaatgtgtagtctcttttccctcactattccccaccctttcccttgagtccccaaagttcagtggattactgttatgcctttgcatcctcataggtcagctcccacgtgtgagtgagaacatgtgatgtttggtacccattcctgaattactttacctagtctccagttccatccaggttgctgtgaataccattatttcatccttttttatggctgaatagtattccattgtactacattcactttatccactccttgattgatgggcattcgggttggttccacatttttgcaattgcaagttgtgctgctataaatataggtgagcaagtatccttttcatataatgacttcttttcctctgggcctctgagtagatacccagtattgaaattgctggatcaaatgttagttctacttttagttctttatggaatctccacactgttttccatagtggttgtactagtttacattcccacccgcagtgtagaagtgctcccttttcactgcatccactccagcatctatttttttttttatgttttaattatggccattcttgcaggagtaaggtggtatttcactgtggttttggtttgcatttctttgatcattagtgatgttgagcattttttcatgtttgtaggccacttgtatatcttcttttgagaattgtctattcgtgtccttagcccactttttgatgggattgtttgttttttccttgctaatttgtttgagtttgttgtaggtttttgatattagtcctttgtcagatgtatagattgtgaagattttctcccactctgtgggttctctgtttaatctgctaagtattccatttgccatgcaaaagctctttagtttaattaagtcccagctatttatctttatttttattgcatttgcttttgggttcttggtcatgaaatccttgcctaagccaatgtctagaagggtttttccagtgttatcttctagaattttatagtttcaggtctttgatttaagtccttgattcatcttgagttgattttgtataagatgagaaatgagaatctggtttcactctcctacatgtgtctcgccaattatcctggcaccatttattgaaaaaggtgtcctttccccactttatgtctttgtttgctttgttgaagatcagttggctctaagtatttgggtttatttctgagttctgtattctgttccattggtctatgtacctacttttctactagtaccgtgctgttttggtgactatggccttatagtatagtttgaagtcaggtaatgtgatgcctccagatttgtttcttttgcttagtctttctttggctatgtgagctattttttggttccatatgaattttggaattttttttctggctctatgaagaatggcagtggcattttaatggtaattgcatgtggtcattttcacaatattgattctactgatcctatggaatgtgtttccatttgtttgtgttgtctatgatttctttctttgtcgttattgttttgtttttttttagatggagtctcactctgtcacccaggttggagtgcagtggtgcaatctcagctcactgaaagctccgcctcctgggttcacgccattctcttgcctcagcctcccaagtagctgggactacaggtgcccaccaccacacccggctaattttttgcatttttagtagagatggggtttcactgtgctcgccaggatggtctctatctcctgacctagtgatccacccaccttggcctcccaaagtgctgggatcacaggcgtgagccaccgtgtccggcctctgtctatgatttctttcagcagtgctttctaattcttggtgtagaggtctttcacattgtttgttaggtatatttcaagttgttttttttttaatttttgaagctattgtgaaaaggggttgagtgcttgatttgattcttagctttgttgttggtggtgtatagtagagctactgatttgtgtacattaattttgtatcctaaaattcttctgaattcatttaccagttctaggtgctttttggatgagtctttagggttttctaggtatacaatcatatcatcagcaaacagtaacagtttgacttcctctttcctgatttggatgtactttatttctttctcttgtctgattgctttggctaggatttccagtactatgttgaatagaagtggtgaaagtggggcatctttgtcttgttccagttcttatggggaatgctttcaactttttccattcagtttaatgttggctgtgagtttgttatagatgaactttattaccttaagatatgacccttctttgctgattttgctgagagttataatcataatgtgatgctggattttgtcaaatgctttttctgcatctattgagatgatcatgtgacttttggttttaattctgtttatgtgatgtatcaattaattgacttacatatatgttaaaccatctctgcatccctagtatgaaacccacttggtcatggtggattatctgttggatatgttgttggatttggtttgctagtattttcttgaggatttttgtatctacattcatcagggatattggtctgtagttttctttttttgttatgaccttccctcattttgctattagggtgacacgggctttatggaattatttagggagaattcccaaggcagaagtttagtgaagcttgagctgcaacatctcactctgctggggcttttttcaaggatgccaggaggaagcagcagccatagccttgagcttgtgcatgaagccctgccctggtttaggggccaccttctgagacctggggaccaggggcttcttgtggtgcaagtggaataccaacgcaaaccccacttactccaccctgtgcccatgatgaagaccatcagctctcttggttctcaagactttgaatcagcctgaagtacatcactggcttttatggttcatagaaaacatattataggagcttctggcctctataactgtgtgaaccaactcccataataaatctgcttttatatatatctctcatatatcataataaatctcactatatatacatatctctcatatatatgtatatctcatataaatatatatgtatatctcatataaatatatttgagagagagatatatatatagtgagatttattatgatatatgtgagagatatatatatctacacacaccagttggtctgcttctctggagaactctgactaatacgtgggccaataattaaatcaaaaagtactgccccaactatagtgacaacagtatttgaaaatagatttttctatttcgatttatgttgctttgcaatgggctgcagtgctcagcccaggattcccagaatttaaaaacttaactggtccatcttggtatctgcttttgaaacaacaggcttgggtatatattgtccaatatagcaggcctcatgtgctccttaaaccagggctacttcaaatagagttgccctttacagttggataatggttaactttaaatagcaagatgtatctagcaagagggtttctgaaaacccctgggtttctttcttatattgtcctctatttcctaaatttcattttttaacttactttagcttggagacagagtttgttgtttttgtttagttgttttataatccaacagtctgcaagattttatcacttgctcaatgttaactgcagattgaaggaatcttcatagcaactcacagtgtgtttacctctttgcttcccaacagattaccttagactgtaactttctctgtttttggtagcatttataaaaagatattacagaaagacacccacgttctgaaacattttaccaaaccttaactcttcagttttgatggacacatgatctgatttcacaaaaatagcaggtgacagtttaaccatctgtttctcctcaagtacaataataccttcttaatctggacaaaggactcactgcacttctcaatttagccactttcgtttctagatctattattggagacatatgatttccagatactaattgttcaattaatcaggagactttaaattgcaatttacagaaatcaactcaatgtagcttaagtaaagtagaacttccttgagctttgttattgaaagatcctgagacagattttcttcaggcatagcaggatcaaggctctgtcagtttcatcaatgcagtttgcttttcgcagaattagtttcatttcccgggagtatttttttgtctaagtggtgggagtgattgccatctgtagctccctgcttatatatatttttttctatggcttaaactctcaggaaaagtagagtggctttcccactaatattcatgaaagtcctgaggaagatgctaacttgtgttcatccctgaactattaatctctttagaggaaggtaagattcagagtattcaggctgccatagtggggcacagatgaggattcggtttagttccatctaaaagaaagtattttgtagaattatgaaattgtggaaacattggctcatagatagaaggaatataggcaaaaaaataaacatataaaaaaatgggacaaaggaagaaagaagaaaaagaaagaaagaggaagaaaggaagaaaggaaagaaagaagaaagaaaagaaatagaaaaaaggaaggaaaagaaaagaaagaaagagatggaaagaaaaaataacaggaaggaaggaatgaacttaacatctaataaatactaaagctagaatgcaacacatctacaattcttacacattttaatacattataaattctagcttgtgtgtattactttttaaatagtaatgtttacactcagatcctcgttgctcaggcctgtgatttaattcatggacaagtattatgtttttaacctaaaaagcatattcattaacctaagcgtaagccactttaatctttgatactcaaataccttatctacaaaataggattaacaatgttttgcagagttattatgagaatgaaatgtaacaatatgagatagaattaagcattagaagacagttaataattactaattatgtttaagtctgtacttgaatgctgggtcagctcataaattttcaagttactggatgaagagtctaacatcatggtaagggtcatattgtgtctaaggtagagatatagataagaaggcataacattttgaaaaagtgagaaaattataagctattgaatgtagataatcataaagatggcctgaggattaacattttgaggtacaatatcgaggaaaaaggatgctcctttaattgaggctagcagatgaatgctaacatctatattttctatgtaagatgaatctattttaaagtccatttcttttccaataatctaattttattatatattaactataatttacagatttttagcatctagaccgcaatatcttaaaaaataaaaatgtaagataaaacagaaataatgtacaaataaaacaaatattagatggaataaatttttgtattaaggcatttctcatttctcaaacaatatccctcatgagacgtatgcatgactgagcaataaaatgagaatcaattaacaagcacttagtttccatgaaaaacgctcctttcccccttggtttctatctctgccaatatccctccagcaaatccagtttgcacctacaaaaaacatactgcttttcatgtatggtttcaaaaggaaagtgagcttgacaaagctaagaaaataaaacaaacaagacaggaagtttttaatatttttaaaagctaaagatatataggttacttatttgtaaatattcttagttcaatacccatacttattaacagtatcactccagtcataatcatacctaaatgtctccatatccttcaggaatgttattgtatccctgacctgtagtggtaatttctaaccttttatttctgtctctctgcaaattaattaatatttgattaattagtatgtttcctaagggggagccatgcaatatgttgatctattaacagatattatggtttctccttaggcttctgatgcaaacatttgtttaaggtgaggtttacacatatttaattttaaaccattttctagttactttttgtgtaattgtaataatatataccctttacaaaaatgagaaatacataaaaatgttcaagcatgcaaaattaatctgtaatacttttccctggagagaattatacctgttttcatattttattgccatggctagaaattacttctcaagaagcatattaatatatatatttgcattataagtttgatatatttgtaatatataaaatttcagatggtaataatttcctctaaaagatatctatgcatactcttgccatattaattactatttaagttaactgtaaatatgttcgattctttaaattcttcatatatattagtatggtgtttgtttagccattacaaaaagcatctttttttatagcttctggcaagaatgccttgtcatatgctagtctaaaacagaatctccagaaagactgcaatagtaccatggaaaagtcatggctcttgaagccaggaaacttggagtcagagccccttaggtatcacttaatgtatgtatatgagaaagctgatagaacactttgagcctcatttatccacatatttaaaatgtgctttatataatatcatttgtcttgagtaataactgtaacaatatacataaagcacctgtcacataattcattctgaataaatattagtttcatctttattttaaaaagattttaagctataagaaaacttgagtgaaattcatgagcttaagaaattgttactgatttttttagagtactttatatcaatattttcctttatacatatacaaagagagggacttttatgaattagggttttccagaaaaacagaactattaggagatatataggtttgtgtgtgtgtatgtgtgtgtagaggggtgggggggaagaagagggagagagagagaattatttaagtatttgtccaccaaaacaccttcagaaaacacatccagaataatgcttgaccaaatatctgggcaccccatagcccattcaagtttgcacataaatttaactaccacaggattaataatggcatgattacttttcacaataaacagtttggtatgatttctgataatttctaactatagaaatggccttttaaacatagagcatttccttgaaaattaattgctatgctagaattaatggcccacaacaatgaactttctgagacaagcattactctgccttgattattattgcttaattactaactaaaggctcctccttgttataaaagttgaatacctcagctcaaactcttccagtttaaaatgtttgttcatgagtcttctgggcatgtaagaaactggttttgagaaaaagaagataattaaagataatcacatgtataaaaactaatactaatattttaaaattaatattatgttgataccatgtaggtttaagaaataaataattttaacatattattcaccatttttctatgtagctataagaaaatttttccaatctctctaatagaattccaatattcttttctaaatggtgaaatgtaccagttaatgcaattattccaaaatattttaccttgacatttcccctctggagttctttattcttctgctgcaaactcagttggttgtttgctaaatacatagctcagtgcaacatgatattcttcttcataattgtacttggaattctctttacatttcccacctatcagagttcttgtttgctgaatatctgtaggataaatacctttatattcagaacaaaacctttcttttgccccaagtcttacatcatggaaatgtttaccttgattgataatttctctgggtacagaatcataagtcagcaaatttttttttctggaaatcccaagacatgattgatttattatgagtttgcatactgccattaagaggatcagtacagtttttgtagagatttatttatatgttccaaactttgtttgcttatctttttgttttaatttttttcacatggaagactttatatcttctctttcttccctttgttctaaaatgtcactatggtgtgtcttgctgttatatttcaatacagaaacttgggtctttcagttttggaaaatacgcttatattatttcttaagttagctctctttgtttaacactttcttttttttctgaaattaatttatagtgagttttggactctattgattcctaattttctttgtttcttctatcacccttctcattgacttgtcttaactttttatttctttattatttataccaattttctattaaagatttgattttccatttccagcctctttttttttttttcagtagagacgtcttcctgtgttgcccaggctgatcttaaactcctagactcaaacagtcctcccaacctggcctctcaaagtgctgggattgtagacctgagccacttcactatttttaaattacattcattaagttataaattatattcattgtaatttacattgcatgtgcaccattctgtgagtttagagaaataattcaattgtgtaatcattacctcatcaaaagatagaatattgccatcatttcaaaaagttttcttgtgcccctttgttgtcaatctgttcttcctacccactaatctaattggaaaccaataacagaatggtaacaagaaaatctcccaacacttggaaaaaaaaaagcaacacaattctaaataatgcatggatcaaaagtcttaagggaaataaaaagtcaaagtaaataaaactacaacttataaaaatttgtgggacatagttaaagcagttctatgagggaaactaatggcattcattgcatatattagaaaaaaagaaaactctcagcaatcaaagcccccacctgaaaaatctagaaaaagaagagcaaacaagacacagagcaagcagacagaaagaaataagaaagataaggtcatacttcaataaaattgaaaagggaaaaaaaggaaaaaactaatggaataaaaagctgcttctttgaaatgagcaataaatttgacaaactactggcaagattgacaaaagaaatcaagatacatataaccaatatcagtaataaaaaaagaattcctacatatggaccctaaaaataacaaacgaataataagggaatattgcagataattctgtaggcatacatttgaaaactttgttgaaaaactaacaatctgaattgaatatggacaaaatacatgagcagacatttcaccctagagaatatacagaaagtaaatatacataggtatatatatatgtgtgcgtgtgtgtgtgtatatatatatatatatatctcatatgaaaagatgtttgatatcattagctattatggaatgcacattaaaaccactataggatattactacacacctatcagaactactaaattaaaaaatagtgacaacgtcaaaagttggtgaaaatgtagagaaactgcaactatgatatcatcatcatgtcattctggggaatagttttggcagcttcttaaaaaaaagtaaacatacaactatcatatgccaagtaattgcattctcaggtttttgttccagataaatttatttaattaggtttggtttcacactcataagagtacacaaatgcttatagttgctttatttatagtagccaataactgaaaacaactagatatccttctagaggtgaatgtttaaaccgacagtggaatagtcataccatagaaaaatactcatcaataaaaatgaacaaacttttgataaacacaaaaacctaggtgtctctccagaaaattatacttagtgaaagaaaggttaatcccacgacagtacattctgtatgattccatataaataacatttgtgaaatgacaaaatatagttaaaaaatagaatgaagaacacaatactggttgtcaggtgttaacaaggtaggcatggagggagagtagtggttgtgactaagagggagaggtgagagatacttctggtgatggacatgtgctgtaccctgactatccatgtcaatatcttggttgtgatattgtattatagtcttgcaagatgttaatatttgggaaaactgggtaaaggacatgctgtataaagaatctctctgtgatatttcttataactgcatataaatttacagttatcacaaaataaaattttaattaaaaaatgaattgatctctttagttcattattgcctcttcactcattgtttttgttcttgtagatatataatattttgctttattttgtcattttggttgtgtttcatgaaaaagtataaataatcaaatggcttagatttgtccttcttaagtacagccggagagaatttaattctaaaataatttgttatctggtatggatcatgaacctccatttaacacttttaacgattcttcactgcttactcagtaaagaagaaattcctagttttgtatttagagtagaggctttaccctgtagcctcaataagttcactatttttactttttgttacttctctgagtgcaacctaagcttctaacacaatgcgctccctgtcattttccaaacaagctatgctttatagcatatctttgtatagaggcattcaaaattatcaatgccataatgattccataaaatcttcttcctgcccctggaacacatctacacaattcccaaggtaatagagtgagtgaatggtggagatggcatttaagtgtagggagcaaaacaaactaatgagcaaaaatcccaaattttaaccactttaatattctaaagcatgttttacatatctgtactattatacttaatcatttgacaaaaaattgtttattctttcatacctactgtactcctaaaacattattagaagttgtcttattattcatttttgtatcactattgccccagacagtagtgctcctaagcagaaattaaacaaatatttgtttacaaataaaaaatgtagttcaaaatccactgtcataagacataaatatttttcagttttccaagtttctttccaatcttcatctgtttacgtatataatagttaaatcatttaaatgacagcagagatatatattttcattctccttttattttactaacattacttcactattttcacaagttgccacttaatcttcataattatcttttaaactggtattttcaagttctagaagggagccaataaatagctggtgatttagtgttaaccagcaatataattttgaatgaatttgatgtactataaaatttattatttctcctattcggtatttatgtggataagaaatatttttgtttttcatgatatgaaaatgatctaaataaactaactttataaatatcttttcctcccacccttcttttagaaatgaaaataaactttgaagatatcacgtttaaaatctttagtgattagacttggcatactcttggctatgacttaggaattcaaaaagaggaaaatactagttcgcggttggtgagagtaagtttcccaacctgccaattaatatttctgtaatatgttacagatatcctggcttcttactctgtgtctctcattcgatgcaatgacattataaaaaataagaagtaagagaaatttaagcatcatctaatttaaccgcctcattttgcttttagaaaactaaattttaaagatagcaagtgtctcagcatgaaactaagaagatcagtgagactctcagactagaatgatgtcttaaatattcttaaggagagaatatgagacagatattttaatatgggttgttccatggctcataatatatatattagcttcattcttttgtattctagttataacctataatggtaatttaatttcagattataaattggtaatttataggctagtgattcctgaatcatgcagttttcacatgttagaatcatgtagttttcacatgttagaatcatgtattcttaattttagtcagctttcctttttattattcccagtatctactgtggttgacatgcaaaatgattttcccaccagtttcttataaatacagtcatgtgccctgtaaggatgttttgctcaatcatggactgcatataccatggtggtcccataagattgttatagaactgaaaaattcctgtcacctttttacgtagtagctgtcataatgtcttaccacaatgcattactcatgggtttgtgatgatgcagttgtaaataaacctattgtgctgatttttgtcattgttttgaaatgtactcctatttatgtaaaaaaagtgacctgtaaaatgcctcaggcaggtccttcaaaagcgattccagaagaaggcctagttatcacaggagactatagctccatatgtgtttgcccctgaagatttaccggcaggataaggagtagaagtggaagatctccatatttatccatcaattaatacaccaatctccatattgataatactgaccctgtgtaagtctcggctaatgtatgtgttttgtattagaatttttagaaaaatgtacaaaaagaaaaaaataaaaataatttttaaaatagaaaaaagcctatagaacaagaatataacgaaaaataattttgtacagcggtacaatgtgtttgtgttttaagctaagtgctattataaaagaaataaaaaaattaaaatgaagtaaaaagtataagtaagctaaggttaattttattattgaagaaataattttttatttatctggtgtagcctaagtttacagtgtttataaatgtacagttgtggttcatattttgtgtagtatatcactcaaatgaaaattatcattgtaattaatagcctattgtctccaaagttttttttcccagtcatttgaaatgttattttgtatcagaagtgtaatttaattatttatttggatctgattaagggctctccttgttgctaatgtgttctctgtatttttctgaagcaattaaacagtatattaaattaaaatatatacatatttttaatctttttctatctggtaagctaagtatcctccttacaattaattattaataagattagtttctctatattttgttttttttgattattttaccattatgatggaaaactaggtgctatttttgtttagttgagttcttcctagattctcatgagtccctttgttttaaaaacgtttttggtcttctcaggttttgatgatactatattaaaatttctcagtacgcaaatgtgttattatctgaagaataatttcctcctaaattaaaagaatgttttcacctattctctctttaagtaggttttttcttattttcatttcattttttatgctttttgctttgcattgattgaaaaattgtgaagttaggtttttgttacataccgtttttattcaactttttcaaaattattttactctttagccttttttatgccacatcatgtctcatttttaatgcttgttatctgtgtcacttatgttaccttctactgtatgctgtgttctatttctaatttaatttgccatgaaataatttaccctgatagcttgctttcttagtattataatatcacttatcatcctattgttaccttaacatttcatttttaatttgattccatatattttgtcttttccttaattcacagaaaagtccaaagttattgttgaaaaaaaatgtcttttatttttcagaataatttatttttccaaaaccaattcttccttttttttccatttctttctgttttgcttcataatttctgtcttcatttctttccattattatttttgtgttattgccctgtcctatctttctagacattttgttaattggcagcatcatctgaacctgaaccttacccttgaccaagtattttgtgaacatattatttttagatgagctctatgtttatgtttagatttttattcttctctctttctctctctccctctcttttttttttttttttttttttgtgactgagtctcgctccaaggctagagtgcagtggcacaatctcggctcactcaacctctacctcctgggttcaagtgattctcctgcctcagcctcccaagtagctgggattacaggcgtgtgccaccacaccaggctaatttttacatttttagtagagacggaatttcgccatgttggccaggctggttttgaactcctgacatcaggtgatccgcccgtctctgcctcccaaagtgctgagattacaggcgtgagccacagtgcccgacctagattcttcttaatagcatcaacttgatgactggaggctataggttctattttatgccctgtattctgattttctaccaacttttagtggtggtgtggggcagtgagggttttatagccagtgaatttttttcattgctcactcatttttaaacttcatactgccttgttggattcatataaggtatagcaggcaatggggatggaagagctttgatttgtgcagttttcctgttttaatatgattccagcattaatgttcacagagcatccattcctgtttccttccaagctagtgcaacagggaataaaatgaggcccatgccatctctcgctgtgtcattccttattcaccgtaggtagatggcctttatttgggacactgtgtttaccacttagtgatatatacatctagagtttaaatttactttttattttaattttattaattataaaaataagtatttaaatcttaatatttagtaataataataattgggaataattagcattattatcaccattctccctgtcagaagaacaagtgaatttgaattgtgattattttattgagaatatttacatctatgttcaccacatatactggcctgtagttttctttttttgtatgtttgtctagttttggtatcagtgtaaagctagccttgtagaatgagttgggaagtgttcacttttattatattttatggaacagtttggttagaattgattttagttcttaactgtatggtagaagtcagcagtgaagccatcaggtcctggacttttccttgatggaagatttttgattactgcttctctatgtactcattattggtttgttgaagttttatatttcttcataattcaatcataataagttgtatgtgtacaggtatttatttattctatgttttccaatttgtgggcatgtagttcatagtaatttcttacagaattaatattgtcaaaatgtctatattaacaaatatgacctacagattcaatgcaatagctatcaaaatgccagtggaattattcccaaaaataaaaaaaacttaaaatttttatggaagtgcaaaagattctaaatagccaacgcaatcttgagaataatgaacacagctggaggcatcacattacctaacttcaaaacatactataaaactatagtaaccaaaaaagcatgatattggcataaagacagacacatagaccagtggaacagaatagagaacagagaaataaattcatgggtttataggcagcttgttttccacaaaggtgccaagaacgcactttggagaaaagaaagtctcttcaataaatggtactgagaaaactggacgtccatgtgcagaagaatcaaactagacccacatctctcactatacatgacaatcaactgtaaataaattaaaggcttaaatgtaagacctgaaactatgagactactagaagacaatatagaggaaatacttcaccaaattggactgagcaaggtttttttgtgtgtgtgtgtaagtcctcaaaagcacaggcaacaaaagcaaaaatagacaaatgaattaaatttaaaaagcctctgcacagcaaaggaaacaataaatagagtgaaaagacaacctgtagaactggagaaaatatttgcaagctatgcatctgaaagtatctagaatatatagggaactcaatagcaaaaaaaacacaatttttaaaataggcaaaagaactaaaaagacacatgtcgatggaagacatacaaatggccatcatatatgtgaaaaatgcttttaacatcattaatcataggggaaatgcaaatcaaaaccatgaaataccaccgtatcccagttagaatggctactgttaaaaagacaaaaaataacaagtactggtgaggctacggagaaaagagaactgttatatgctcctggtgggattgtaaattagtatagaaattatggaaaagagcattagggttctttaaaaaattaaaatagacgtgccatatgatccagcaatcccactactgggattcattcaaaggaaatgaattcagtatatccaggagataactgcagtcccatttttattgcagcactatttgcaataggcaagatatggaatcaaccaaagtgcctatctacagaagaatggataaagaaattgtgatatatatgcatatacatcacaatcatataatatatagtatatatctctacacaggcataagtgtatataaacacacacacacacacaaatactatccagctataagacagaatgaaatatttacatttgtggcaacatggatgtacctggaggacattatgttaagtaaaataagccatacacagaaagaccaacactgcatgatctcacttacatacagaatccagaaaagtttatcttatcgaagtagagagtagaatagtggctaccagaggctggggagggtaaggggaatggatataggggagaggttggttaatgggtaaaaaagttatagttagacaggaaaaataagttcttgtgtcctattacacagtaaggttattacacctagtagcaatgtattgtatatttcaagataactagaaggactgaatgttatcaccaggaagaactggtaaatttgtaacatgatgaatatgtttataaccatgatttcattaggtatacactctttgaaatatcacaccgtaccctataaatatgtgcaattatgacgtgccaactaaacattcaaatatttaaactggtgactgaggacagttgtttgagtgtaagtccatcattttcagtgtaaaaccaactcaaaatttaaatcttattgatggcaaggcagttgtaaattacctgtgtgtgtaaaagatagtttttaaggtctcaatgttgacaagatactatttaacatgttggtaatattcccaggtttgctgatgtgtgccatcaaggcaggtggtatgaataagcatgcatgcacacacatacacaccactacacagaaacgtgagcttttggggcatttgtcattactttcaaagaagttactaatggtcaattttgagaacataataaggatcttcttagtgttctttcgctctgaaaaattaactataaatactggaatgattaaaaaatgaacgatatgatgttcaactatattctagatttgcccttgaaagaaacagccactgagaactggggtcaaagtcccaggaacaactggagtaatttcatttcacctggaatgcttctacttaaggaaagtgttgccatatctagatgcctctggtagaaaaatgatgaatgcaacttttccagaagttcagaaaaaatgaaagcgtgttgacacaacaaaatttaaaaccatattttactttgtagatagtcactcaccgtacgtgcccttcatcccaatcttctcttctttactcgtctgcatttggtgacatttggaacattaaccttcagactgcagtttccttatttcactttctcctttcttagctaagattaattttaatcagatggtaattaaaataggcactgcataaccaactcacacttctgcaggtaattaaagcttctagattcatgcattttccccctcccagctctgttagaagcagtgacagataatttgtatttttccttgcagcacaattcctgttgcagtaatggctcaagttctaataaatctcttgcaaataacttgtctgggctgtggaatatgagacagaaattatcaactgttcatttgttcttctttttctcaaaaatgtgtaattcccagttgtatgctattgattctaaaaactataatttgtcattgttttattatgaagtaatagagaattttgtcccagaagtcaagttactggtgaaaaccctaaagcaaagaagagcagcatttttattatttccagtcttatttctttctcttttatggcaactgagcatgatacaaaagatttttcaaaaatatttctctgtatagagggaaaaaacaccttaggaaatttggctatatttgtctctcattgctcagcatcaccatgttgaaaaaattaatcaccttctggccgacagtgaagtatataccttttttatggaacctttacttatttttactacttttaagatagatgcttgagtaatctcaatgtgaacacattacatgacacgcaaatgtaggtgagagttgctgttcatacactcaacataggcaaagcttttctttcaaacagaatgccatgcctctcacagctgcagtacatcattcagcttcagagctggagctgcttgaatgtcactggcagccccaaccttggagggtcagatcgcttgccaatggtttcaccagcaaacaaaagcccaccaaaatctcattctttggacaggggttgcctcttagccgttgccagagtctctggtgagaagctcactatgcatctggtggttatgaaatctcatttcattacactactaatttacagagaatgaaattataaacaaggtgattactgagcataatttatggcccacgtaattatatagctgtcaaagtagtgttggcagctgaattgtgtagaagggggctgtactttcgcctggtctactgagtttgttaattgtgcacagctgaattttttttttttttttcgtatggaaagatcggcaactttggttttgagagcccagctagacttggcactgcctgactcaaaatgttccctattggctttgtgatgaaaaattatgccccaagcctttggtcaatggtggagaaaatttgtactttgctgatggtgttaggaacctaatgaaatagtagcaagtaacaaaatacagagtcacaaatattatatctctatttttatttaaataactgtcactgttttatacacactcatatttagatgacatgataaaagtaacagttgtagtaagatagcttagtattgctacagtgaaaaataaatagaaataaattatatgtttaccgtttctcagtaaactagacctctgagtgtagctatgttacacgtatcccagcttttacagcttgtgtggcagatcacatctctgaataactacaaccaggtgaaacacactcagtgaccttaacctgttgccaaaggaggcaagggaaaaacgaagcacagagtgggtcattaaaccaaaggtgttgtttacacagctataatctgagtgatttctcccacagaatcgcttattgtttgctgctttcattttgtacgtattgcctgggaaatataggcacatttttatatacctgagtagcttgtgctgtagataatcagaaagttttaatgcaaaaacagaagtgtgtaaactctattgttgatacaatggatcaaattccttgggtaactctgatttattttagcttattctgctgttatatatgcaattgataatgagcagatagacccactgtccctttgtgccttttctggctgctatttctagtactagttttatccagacttctgtataactgttctttgtgaacaataacaatgattgtactgcattcactattttccttagaaccaggagaaaaagagtggaaggttctgttcccaagatatgctatgtataaatgttaacatcaatgataaaaagttactgatgtatttttacttttaagctaaaataaaaatgatagtaagtagtattacagctaagcaaaattttacatgacttccgctaagacacagattaattttatttaaaaaatagtaattgagtttctactatgtatcaaatatatttagcaatttcctaataggctctaataaatatagtaacttgatagccaaacagttaatcatcaggaaatagtattgttggaaggggttcatgagaaaatatgtatacaggaaaatttatatttttcttgaaattgattaaatcatatatttctagtaacccatatacatttttagaaagcaatctatcaattttatcaaggtcatctggtcccttgaatttaacttaaggaagtaagcagagatttataatcagaaagtgtttatatgcaacatatgttattagcagtaaaagattaaaaccaacctaactgctattacatgaaagacttagtaaattatgacatacaattaagatataaattgaaaagaaattagctaattaaagcattatgttgaggttataatatctcaaatctaaggtaacttacagaaaagtgagaataaatggaaaagcaaaaaataaaatgtggactagttagtttggtagaattatgtgtagcattactttaaaataccaatgttaaagaattattatgtaatgcatattactgaatattttaaggtaaagtaaagttcgcttttcccttccatctccattttagagaccctgtttggttgatcacagggcaccaatttctagcagggagccagggctgtgctatgtaatggtcaagatatcctccagactcatttccttgacaaaagccagcttccagctcagatacattcaggcaaagatttagaaaatgtttcagatttctaatcaggttcccaggattgtttgccgaaggggaaatggtcaaagccggcatcctctctaaattaataaaaatccacactggggcaccctatctcctctcttgtctttgtgatctatggttactggaaattcaaccacaggttcatgggttctaatgcaaactcattttcaggcagtgtaagttttcatactagtggaaagctacagaaaacagaaagcaaatggaagttaactctcaagaaaaaatatcaaatcatgaaagcaaacaatttactttgttcttaactgtgacatgaatctattaagtggtattttattcaataataatgtattatatttcaataaaaattagtatcaattttttaactttcatatgtaatcatgcaaatctctgtgttaagagggctagtttctttacaggagaagaccttaattgattttacattatttaatttgattctaaaatacacacaaatacctctgttggttacttatctgaataaaaatcaccatgtatttattaattctgtattctttttcaaatttatgaacttcactggacatgaaaaagtaacatcctctcctacaccagaaacaagttagttctctcctttaccctatttctttttctccataaatatacagaagtctttctcaatccctggcaagatttcatatgtaattctttttcagtaacttgtatatcattctattttgtcaccatagctttccaaaactgaggatcacattagtttgaaaacaaagacaacaacacacaaaaataatgctccattaaacctctcatgctgcaaacagaaaaattctagcaaaaatgtaatcaaattagttcacccttcctgcttaagtagaaaagattacagagcaaagtagctgaagtcatatcacaagacttttcctgttacaaataaaatctttctctttatcctctatccttggaatttttctcttcctccaggcaatcacacgaggaaagattcttaattcttttgatgtgccacgtacaaatgtgtattcacatgagacaattaaagacttttttttcaccagccttctagacttgggctgaatcttaggtttagggggaaatagctactctttccttctctttgctctaaaatatggtatttatgctactctttcctaggtatacattctagtttccccccagtttgtacaggtgagggatagagtggtattttaaaatatgctctaataacttagatagaaaagggtgatttgcctttcggctcttgttttatttctcctaaatgttgttgctataaactcttgattgccttctttccaacttcttgatcagactgggattggtgaaatacgttttaacaagggatgttgatctgaatatgcagagcatttattgaacgattgttgccaccttactcttgtaaaaatttttaatgtcccagctgctaagaaaggaatatttaaatctatacacaaattctgtagtaatctaactggatgcattcaatcccataatcaggaaaactgtgatttctcatttaggcaaagcagttttcttccttgctcaaaggaagaaaactgcccactatgaaccctgctcaacaacatgttggctgtatacatgcctttctgatccatgtcaatattttaaatcttccatcacttcaggctaattggcagtaattcctgcatgtgtcagatgtcaccctatttcaaagaaatgcatgactatcctaatttttactttcttcctttattctcctttttaaaaaatattttcttcccctggtgtttatctcattaacacaatgttgaattatttccatctggcaagctggaaaaattgcctagaattatagagaccatgccaaaaactaacaggataagttatttatttgttctggccctctgcctcctttatcctagtggaggttgtagagatagttattcattgcttatttggaatcctattacttaaagggaaagcaaatgctggtatttgctcatgaaaaataacacagataaggaacctagtaaactaggaatagtaataaccaggcataacccctgaaactggctttgaggtgtggggatttccattgaaagaaaacacaagagtggaacttttataactgggcatcattactaataggtcaaactatggaaatattcctcccaaaaaggagagctataataaactggtgataagctgtaagcacaacaccaataaccaggaacaatacaaaatatgtcaggtttagagtagaagaaaatagataatggtgtggatgaagaaaagagtgaaaaaaaataatgaagtgataagcaggaacaatatgactaagacgttttctccaatcttgatgtcctttagggaaatcctaatgtgacagggcagactgagaatgtcaggatttctaaagagcatttaaagtgatgataaatagtccctttaatacttgcaataatcactactacggaggcaaattaaatgcatgcacatacagtaatgaaatatacttgtctctaaagtacaaataccatgtagcatatactgtaatgtatatgaaaggattaaacaattagcctctctgcactgctggctgccagaaagatatttcgatggtactaaataagaagtgttaatggcatcactgtcgttgttctataaggaaagttggtgaaaaaaaaaaacttgcaatgggcaagaaatattatattactaaatgccttttatagcataccttcctgagttacccgaacctatctgtctttgaactctttgctcttaattgtagaaaactgatagtactggctgggtgcagtggcgcacgcctgtaatcccagcactttgggaggccaaggtgggtggatcacgaggtcaggagatcaagaccatcctggctaacctggtgaaaccccgtctctactaaaaaatacaaaaaattagccaggcgtggtggcgggcacctgtagtcccagttactcgggaggctgaggcaggagaatggcatgaacccgggaggcggagcttgcagtgagccaagatcacaccattgcactccagcttgggcgacagagcgagactccgtctcaaaaaaaaaaaaaagaaaactgatagtactgaaaataatcattttgtctgattagagtacaattatttctatataaataccagttttgtctctatttgacattcgtttcagtgttcatgatggcatatgtgtttgtgtgtgtgtgtgtgtgtgtgtgtgtgtttgaattttccttggaatcaatagtaatagttcaatggtaatcttatcaatgagttaaataaaatctttggcacctattcattttaaatttgtgtaaggattttaaatttataccttgagcagtttcatgagagaatctgctgtcagataaactttttcttccaccgagaaagtgtgacatggttatagaactaagtttagagagcagtgcagctacttagggaaagtaaacaggatctgttcctgaaataagtaaactgcccatcaaaacttcataatatatccaattgataaagtctttgcttaaggcttactttgagcaattgattaagcagacattgaactaagggctctgatataaggaagcgatcggcccagcctgggtggatgttttttagaggcagaatcttgctatgttgcccaggctggtctcaaactcctggcctcaagtgatcctcccacctcagcctcccaagtccaattgttaagaatatgtgctttggagccaatacaacatgatttaaaagggagttctatttcaaacaaacctggggcttttgtctagttctttattgatttgcaattcagcttcctaaggtataaaagttgtacaatgagtatctgtcttaaatttttattgtgcaaattatgtgataataatacacgtgaattacttagaatgcacctagcgtgtaagtgcttagaagtgtaacatatatattgtccctagataaatatttaggtatacaaagcgtccaagacttcaatataattgtcttactatgtatagttgacacataattacttctcatcatattatcttcattgttttccatctacagaaaaatatgtagcatacacataaactttaaaatatcaaacaataataaaaaatgttagatattctgcagacattattgctaacgcatgtaatagtaagagctaacattaactttttattttctatgggttatgatatactttttctatgtcttattctaacgttatctgcgtaaaagcacagaggtagttaaaattactgtctcactatacagatttggaaactgagacttcccaaggtaaagtaacagcttaagattatacaccttctatctggaggcacaaaacagatcatagggagaatatatgacataaaagaattgtcatttgatacccgtacaatgaatagtctaaacatagagcacaccagtttcttaagaatatttcacaagtgggctatgacagagataactggtgctatgaaagcatggctgaagaatctacacattgttaaaaattattcacaatttatgaaacttcataggctttaaacaaaaagacagagaattaggataaggactttcatagattaagtcgccatacaggagcagatgacgatagtaaccaagtagaggatagaaaagaaaaccgctgaaaggaagatgggaatctgaatgctctctgatggatatcatttctcttaaccacacagactcagaagtgtttgagaaggtgagattaaattcacagtgggcgtcatgtacaatttgttaacagttgtcatttgaatatgtttgcttatttttagaaaagcagtttgcttatctctacattgcataatttatttcagagtcagtcattacacctaactctttgtgttaaaattgttgctcatatctttgaatatagatatgtgattgttctggaagtaattttcagacattatactgtgcccagaatgtaaagaccaaattgtagatccaagacacctacataataaataaacagaagtacttcttaaaaaggcaatttgttgtcattattgttaatctactaattggacatttttgttaatcttccactcattctgaagggctctaaaccactgtcttatagaatagcatttaaagaaagcttactactcccactaaaaagacatttccgtcagagtgataggtacatttgtctgcaaacacatgagcttatctctttaacagtgccatttattgccttgtaatctgtctcatctcctacttgtgcctttgggcttacctcagttcttgggccccataaaacagaagcaacagacatttttatagtatcctcttgtaatctctgcctcgttttccagttaggtgagtcttgcctctaacatatctacacactggtttcctaccctttccttgactaacaaccaaagccaagtttcggttattcaggacttggtcctagagaacattattatctttccaattgaactaatttttcccctctctattgtattctttctcacctcaatgtaaaccagacacaactgagcttttacttgtttagttccttggacctgagcagttttcttgcctgtgacttagtccagagtccacatcaccctctctactcactcccattccctaacaggagcactgccttcttctgcactccagtctgttggccgtgaccaaggcagcctacttaccttctaagagaataatcctctttcctggactggacccagtgctcatgccctctgaccaatatttttccatctgtcttatcccttaatattaactgactccaaatgtgtcctgtgttgctgaatacaccaattaagaccatttccagaattagtattgacatattttcactctgttccacactgggcccgaatgaatgcccttctggagctgactatagcggccaattctctgaacccctgtccagccttagtgagtatatgtcagatgatgctactacaataatcaccttccaatttatcttttatgttaatgcatattcacaaatatctaacttaccaaaggatagttttatctgtattcttcctttttaaaatatttcttttctgaaatttgaacatgacagaaagtattctaaattattactgtaagtcattttagaaccttctgtcttgaaggtgataccaagaatccccttcatagaaaagtagaggaaaagcttaaagactgacaaatggagtttttggtttttaactaataagcataattcttggcaaaattgttgaacttggatgagaaaaattatctcatttcaaaatgaaatttggatatgattatcaaatgctgaatttggcattgattttattttggaaaagcaaatatatccataaaaaagttttcttgagatttacagaatatttgttttttataacatgatagtagaaatgtagttaatgaggttttaaacatactattcgtaactgataatgatctttaatttttaccagttacctctcctgcaacaatctatgcaattttatgcattctcaccttgcattcaactaggctactctcaatttttcaggattctttcttttatatattctggaggggttttagatttgtttgactccccagaaagtactaggtcctcactcatgcttgtgcctcatttatttgcccttggcactttgcacatgccaacattagtaaggtcccagcaggaagcagcacactgctaattggagagtttagtaaagcaaccacatacaatggtgtggctatgatttaaggaaactgaaaaggtactttacaatggcataacactagctttagtgggccacctttcaccctgaagcccaaaaagaccatgggctgtctctaaatctgtgagcagtatagagtaagccacagcacagccagtctgcagtgactcagcaagaaagtgactgtgagaataaatacgctgactgtaattgctgatcgtccttttatctcctgctagtgactcccgttgaggcagtccataaagttcagcctcccaggagaaagggtatgatggagaggttcatgtctcttgtgaattctctgcctccccaaccatactctaaaatcctcaaaaacaaaaataaatcatcctccatttaagtattctaagcttttgctttatgcccaatacacagacactaaataaatgtttggtgatgaatatataaagagaaatttacttttatttttcaaagtaatagagctataatccaaaatcggtacagcagttataagaatattactattctttctccttttagggtgttcaggtaaatattatcttctgcgtgagaaaatctataacatttcctaaatttatgggagggactttttgagtaaaattacattatttaaaatagtgttttattgaaacaattgactgattcaacatacaagatatttggttgttaaattatattcatataatgttgaaaagagaattcttttttaggtttattaactcaaagctattatctttgatgatgatctttccactcctattgcctgaataccaaaaagccccttgtatatattacttgaaaattaccaacacaattcctgattagtaatataaagtgctataattgcaatttaatgcttctcattgattgtttgtgactctgtctgcaattatatattcaatatattcacatattctatgaattggaagagaaagagactcatttatatgtatttggttcaggtgtactataaagattctttatataatatggaaaatttcagcttaaatttgacattcaaatttaaaacaaaaaagaaaagaaggaagaaatctattgcccatcagaagtttgattttctaacttagaaaacaaacaaatcaaccaaagcataaaaaccaaaatcatgtaacttcctgacactagacattgaacttagaaaacactaagttaaaagaccattgttggaaaccttgcatttgtatactcttggagaattacttatcctctctgagacccagatttttaatctgtaaattgagatctttctagttgcaggaaatgactaacaataagaagtaaaaggaatagtaaaatgcttcttgctgagtagaaccacaatgtagtttgatgatttctaatacaatataaaagggatttgttagactgagttacttttacttccttgaaggtttgcaggagtacaaagagtgactagttaagagtgagctctgagaattgtgcccccagtttgtttcaggcagctctttcttcaacctgatcattacactcatgtactgatcagcactcaaatatttgaggaggcggatattcaaagctcttctgtgttgctctctcctgtctggttttcttccatgaaaattttagctacccctgcacactcccagctccttttgctcaactgtgtgagaccactaggcccctcttgagttccctctttctgaactgcaactcaaactctttccagacaggaatttgggtaaataattgggcttactttgtttattttctctatctgagctatcactgtcccatgctgcctcacttccaatatctgaaaacttttatgtattttgtcccattcttttacttgtttcaaataattgtgcaaatccagttcccgttattccttcttaacttaaaaaggtagtcccatataacagataatgggatttatgtcaccttggattcctgagtgactttatgaatcatggtccttcctagccttaccctgctaacttgtttggatctgttctccaagcaaagaatgaaactgctttgttttgtcaaagaaacaatgagtttaatttattaaacagcataaattactctgtttttcttaacatgaatagtatgagaaaatgatagtagttgtaggtgcattgcttctctcacaccatgtagatattgggaaagtgaagggaagaaacatgagtttcttcttcattctctaaatgcaaatgctctccaagtactgtcaattattttttcttatatttttaaaacatcacattactttttatagtggtaaaatatcccccactgttttctgtgtctttattatcatcctttcgctcctaaaatattttaaaaacatgtactcaactcccagaaatatcttcagactcaatactactgcaaccttacatttacaaaggttaatactaagtcttgggaggatcaagtggattcacaagtgacttaagtgctttccaacacaaaggttaattcactttattgaaagacaacaaagtccagaatcttagtaacatagcatacataacgcccagcttacaataaaacatactacatgtaagaatcagaatattgacccataatctggaggaaagagtcaagacaaacttagccagaagtgataagggtaatgaaactcatgggccaagaggttaactcaactattttaaatactttcaaagatttaagtaaaaaattgacataatgagtgagtatatggagaaatgaggcaggataaagcaaattatttatacttaattacatattttatatatatatatatataattaaaaataagtgcttagaatagtgcctaacatttacttaggcacttagtaccaaaatatttgttaagtaaaaatatccaaatggtttttctgccactcatcaaaataatcaaacccaatacttatactcaataaatgcttatactcataaattatatgttatgcctcagtttattttcccttgttgtgtggcactctgtatgataaattaattttatttcttttcaaaaccaaatttaagggctctacccttaataaaggaccccacagttaatcttataaaaaacaatattctaggtcatcacacattttctggaatttatttgctcattacttcatttattcagcaaatgtttgttgattacctactaagtactgagcacagtgttagaaaataaaaatgctctcatgcagcttacattttatcgagggagagaaaaacaaatgtgtacataaattaatgcattaattttagaaattcaaaaagacaataagaataaaacaaagtaatgtgagttcgactggcaaggagtgaggaataatttaaattggatcatcagggaagtatttgcttaggcagagatattccagtgacacctaaattctatgaaaaaccagaatgtgaagacctggggaaaacatttccaataaagggatgaggttggttcatgttacaaaagaggacaaataccattggtgtttgtcactattatcagtcaggtctagtcaggaaaataggaagaataccaattattttaataagtacaaattaattttgaaatattctaatgacgtggtagaagactacacaggcaaaaaggaattgctgtattaacacagaggaagctactgcaggaggcagttgctacttttagggcagtgagaaccaaaggagtagggttcatacaagttcaaggtctggaagaggggccctagctggggctataggttttgagggtcccatgtggctgtattggactctctgaggggtataataaagttagttctgggaatatgaataaaccctgaaaactagaaccaacccgccactgccatggggaggtggtgttgctggggtgacactgctaagaactgtcagtaaacaaaaaggatcttctctgtctccctctttaagctttccactgtctttcttgtacatcatgttggcaaaacttaactgggagccagatagtaaggcagaagtaccttagcatagtttcagtccaaggtgagacatggcatcttaataaccatgacagggctaaagtagagttatcacaaggaaatagaatgctattgtgagcatcatacccatactgctactatgaaatacagtcatcccatggtgtctgtgggggattggttccaggaaccctgtagttactgaaatccaggaatactcaagcttcttatataaaatggcaaaatattttcatataacttatgcacactctctcatatgctttaagtcatctctagattactttattacctaacataatgcctacacatcacttcatttgcatggattcaacatagtatttagtgcacgccaaattcaagttttgcttttcttttggaacgttatgaaacttgtttttgaaatatttttatctgtggctggtggaattcagggaagcagaatacagggatacagaaggctgcatgcagatgctattgtgggcaatttgcaaagagtatagatgctatactataaataaagatatgataggaagatcaccaagagtcttaagtatatttgatttatatgtggagaaaatattagattgctacatgagaagtagattggaaagtattaagatgggaagcaatggaatctagtttagatggaattgcaataatccatgtgacaagtgtgacttcaacctgattgttttcagaggagatagagagaagtgaataaattgggttatagtgcagaagtttctgtggaattagattaggaagatgaggaaaaaagatgaagcaaggatgatcctcttggtttttaatttgagcagttattggaatgggggtgatatatgatggaatgtagaaggttggtaggagagttctctttcgtatgtgttaatttttaagtgcctgtttcacatttaaggaaaaatgttgattgacagctgaatatattattttggaggttgaagaaaatatctagctagagataaaaaaatttggaatattgggcatcaggatgatatgtaaagtgcaccagcttacaggaaaagataaaaacaagttgaagtacaaagcccttggtgcctcataatttgggatgctcacatgacctagtaaaggagtaattgaaaagagctgatcagtgagataagaaaagaatcaggattttgtgctgtcacagaagtttgtagagcatgagtgtttaaaatggactgagtgctgaattgaaggaaatgtgctgagagctttaaaaacatagggacaaaaagaaaaaatgagcacaaagtatggtaggttggacctttctgataaccttgacaacaatttggttaagtggttgtaacaaaagccagattggggttgtagacaagagttgatggtgaggcagtagaaacatcaattacaaagtactttttcaggaagatttgcagtgaaggttattgaataaaaaagatagtagctggcgaggaaagcaagcttaaggaagagatttacttatttttttttcctgtaaatgaaggaaatcgaggttgcttacatactcattggaacaaattctgtaaagagaggaggaaaaaaaagttgccaaagcagggatgattatttgaggaaagtctttgaaagtttcaagtcggaagggatccagataataattggaggtgtcgtcttttattaggataggtgatattttctccactgcaattgaacaaaagtcagaaggtattagaacaaagtaggttggtttatagttttgttagtaaatagataagaatattatttttccttgattgcttttaatttataaaattaccgaggttgaggaatagaaaaagggccctggaagtttgagaaggaaacatggaaaataataatttgaaaaagtgaagagtaaatataatatacaagtgcagtaaattgtgaatagtagtattgatgggcaataagatgaacctatttgaaataaacggcataaatgtaaaggggaatcagcaaatagaattggatgattctccggttaggttcagctgctttggtaaaaaataaaatcatgattccctcttccacgacatttttgagtctctcattttaataagtgaaaccataaattaaataatttttcaaactaaaaacttgggaatctgctatttgcttaatcatctccctatctcaggccatcagcaatttttgtgggctttaatagaaaaatatatgacaaatctgaccacacgtttccacctgcacctttcattttctcatcaagccaacagcttctctcacccagtttattaagagagttcaatgaactcatgctcctgcttcaattactgtgccctggagcaaccagagtaactgtgcagtttacatgaataagacaatattatttcttaaagggcaaaattttacaaaagctttccattacatttagaataaaaatagaacatctatcttggattttaaggctgtgcaccatctacattctgcctgctcctctaaactcatcttctcccagtgcctcttactcactcaatcacagctacgctggcctttgtgaagtttttctaacactgtgagtttagtccagattcaagaccttcatgtttgctgttccatctcccaggcagccactgcctctgaaatctattgacttgctcacttcattcaaatatctgtgcaaacgatacctcctctaagagatctccgatcttcttatataaaataccattcccccataaatctctatcctttgacctactttaattttttaatagtggttatttgaaatttgcataatttatatactttcttgttaaagatcaatgtctccccatggaacataacactctaagtcagagacatttttaatactctaacctcagtggccacaacagttaccagcacataggacacactcagcacaattttatacctatatttattcaagtagattttctttttattatctgatacagattctaactagtaacacagctgaaataaaatctaagttctcttcatttcctttaattatattgcatagattatcacaatttgtaattatatatgcaattattctgtgtgatgtttgtgaaattcacaagagtaaggaacagtctgttgtccattttgttcactgatgtattgtccttagtttacacaattcctgaagtatagtgtgtgcttcataaatatgtattgaatacataaatgaataaactcaagaatgtagatatgaaaaaattgatatttctcaatgtatagggaaacaagaaaactgagttagaatgagttccctaaccctctccacacaggtggccctggctctctaaagctagctatgaaaatactgccctctcatggaccacttcagactaaattagaaaaagcacactgtatctattccattattatgtaaattggaccctaaagggacctatactgaaaggtaactatttaaccaaaaattaccaatctgggcttcttagacttgtagatgatttcccattgcaatatactaggtaataaggctgtacatgacaggacaattttaactattgtgtttatctttcagcctgcatgacttttaaaatgctttcaggattaaaaatgaagggacctcgaccgtggggtttcaatattaaagatggtcagaaaaatgtaacaaatccctacacacctggctatcagcacaactctctgcttgtttgaaatatctttgtttgtttttcacaccaacatcaatgtaactgggaagaatcaaataaacaatttgtaaaggtgactcttaaaataacgtgaatatatgtgagtatggggaatgggggtgatgatgtaggaaaacacaaggttttgtgcattgtgagtaagggaggagaccacccctcatgttgtcttatgcccaatttctgcctccaaagaaagaagaagtaaaaactaaaaggcagaaatgaaatccacaggcagacagcccagcgctgtgccctgggcctggtagttaaagatcgatctctgacctaactggttatgttaactatagatttcagacattctgtggaaaagcatcattaaaatccctgtcctgttctgttccgttctgattactggtgcatgcagccccaagtcacgtacccgctgcttgctcaaacgatcacgaccctctcacatggacccccttagagttctaagcccttaaaagggacaggaattgctcactcagggagctccgtttttgagacgtgagtcttgccgacgctcgcagccgaataaagcccttccttctttaactcggtgtctgaggggttttgtctgcagcttgtactgctacatgagtactgcactccttattctggggggaaagtggtgttttacttctactccctcattgctcaatccaataatgtgacttgcattaatagtgctctcagaagggaaaggtgcaagaactatagtagagcccatttagtaatttaatcatttgcatttgtatggcacgtttttccctaagtaatcaagcacttgccttacacaaatattccctagaaataggtcagtttgtctctgacatactggcatcttcttctgtacttctcactccccaacgaagtgacctccccttcccgcatttagttccctgaaaacccctgctcccctctctcttcactacaggtaagataattacaaatattctgagtataaaggagttcctgagattgctggacaaaaaaaaaaaatgcttctgagacttgactcccttttcatttctaagtaagaataaacggcagaaactttataaaatctagatttttaaaatttgggtaactcactaaaaatgcagaaatgcagattcctgagttttaatgagattatcagaaaaccgagaacacagtttctgggactgatgtcaggaaatgtagttttagcaagcattccaggtgactagatacccctcaatgctttccattctatttattagttattttaatattattgaagttataaactatattaaaaatagaaaaattcggctgggcatggtggctcatgcctgtaatcccagcactttgggaggctgaggcaggcggatcacgaggtcaagagatcgagaccttcctggccaacatggtgaaacaccgtctctactaaaaatacaaaaattagctgagggtggtggtgcatacctgtagtcccagctacttgggaggctgaggcaggacgattgtttgaacccaggaggcataggttgcagtgagccgagattgcgccactgcactccagcctggtgacagagtgagactccatctcaaaaaaaaaaaaaaaaaaaaaaagataaaaattcaagaaatagttaaaaggacctgttagtttatataatatccagatttagtacacagccatttatttttgcattcatgagttaactaaaatttaaacaaaatattttaggtgaattttaaacctcactcccattctatgctatttctcccctctccacagctaaccaataccataaagtctttatatgtgttatatttgcatgtttctttgtattttattcaagtgtaatatcatgcatatattttcagaaatcatgatctactttgtcactatcacccagaaggagaaagagaacattgccaacacttccggaggccttctctttagtatcgccctcctgttgtctcaaataatgccttggatattttattcccaaatccttcacagaaggatcttaaactctcacttctgtttacttgtttccccagtataagatatcttataatgatataatggagtcacatattatatatgtgtgtatatatgtgtgtgtatacacatatataatatatataatcatatataatctatatatggattttatttttgagtaactttaggcttacagaaaaaaattagagaaaagtatagagttcccatacacccctcctacctcagtttctcttattattaacattttgaattagcctggtgcatttgttacaattattaagccaatattgatacattattagccaaaatctatgatttacattagggttaactctctatgttatgcatattatggcttttgacaaatgaatactgaaatgtacatatcattacagcatcatacaaaacagtttcactgccctaaaaatccacctgtattccacctattcatccctccctctccacaaatccctagcaacctctgatcttttttccatctgtaatagttttgccttttccaggatgtcatatagttggaatgatacagtaggcaccctttacagataggcttctttctcttggcaataggtagttaaggctccttgacgtcttttttggtttgatagttcatttatttttattgttgaataatattatatgatataacagagtttgttcatccattcacctattgaaggacatcttgattacttcctagttttggcaattataaataaagctgctatgaacatttatgtgcaggtatttctgtggttgtaagttttcaactcatttgggtaaatacgaaagaatgtgattggtggattctatgataggagtatatttaattttgtcagatgctgacaaactgtcttttttaagtgagtgtgcctttgtccaatctcactagcaatgagtgacagtccctgttgctccacatccttaacatcagttggtattttcagtatttcacattttctccattttaatagatgtctaatagtatctcattgttattttaacttgcaattccctcgcgatatttaatgttatgtcttttcatgtttatttctcacttgtatatcttatttggtgaggtatccagaccttctgcccaggttttaaattgaattgcttgtttattttaagagttctttcatattttagatactaatcttttatcagacagattttgcaaatagtttttccaatatgtgacttttaaaaattctcttcacggtattttcacagaacagaactttttaattttaatgaagtccaatatcgttttttcataattttgcttcaatgtggtatgtatgtaagaagttactgccaaatacaagtcaccgagattttgtcctatgttgcattttagatattttatagtttctatagtttgacattaaatataggtctataatccattttgagttaattttttgagaagcaaaggtctttgcctagattcttgtctttttaaaatttctcttcttttattttattttattttattttcttgtctgtttccctctctctctctctcttttttttttttttttttttttttttttttttttgtacatggacgttcagttgtgccagcaccgtttgtggaaagaatattctttctcagacgaattgcctttgtgcctttgttaaagatctgttcattgcatttgcatgagtctatttcttgactctctactgtgttcctttgatctgtttgacttatctttttgccaataccataggaccttgtttcctacagtgtttggtcaggtagtgtcagtcagcagaacttgttcatctcagatattgtgttgacaattctgtgtggtttttgttgttattgttgttgttcgttcatttgttttaccttccgtataaattgtagctcactttgtcaagatccacaaaataacttaataactttctgggattttgattgggattgtattgaagctgtagatcaagtatgaaagaactggcatcttaataattgtcagtccccctgccatgaacattgaatttttcttcatttatttagatcttttatttctttcatcaggcttcttctaattttaataaactgttttggttgttctcagcagattcactggtctatcacaaattttttcatcacagctggaaactgatttttttccccagatgatacttaaggtctctaaagcttgagatccactgtaatgcagaaatagattttgatttaatataaagaaacacatttcaaacatgaaaatgagtttaaatcaagggtagaacatgaaatcaaaatctctggagttgcagggcattggctcaaattattgatctaatatttgtaataagtcttgattagatttatttgatgcttatgagcatctttttttcaatgtgtgctctgcagatataagcattatcaattcaatattgcttgatgagcattaaatgacctagcatatgcaaattgctaatgaataacaaatagtacttaatgtattattttgttatattttatattttgttattggttatagaaaaagatatgtaagtataaataagcaaataggaaggtttttccaggtttaaaaaaaaattattttaattccagaggtccaagtgcaggtttgttacataggtaagcttgtgttattagggtttgttgtacagattatttcatcatccaggtattaagcctggtacccattagttatttttcctgatcctctcccttctctaaccctccaccctctgacacaccccattgtgtgttattcccctctatgtgtccatatgttctcatcatttagctcctatttataagtcagaacatgtgatacttggttttcatttcctgtcttagtttgctaaggataatggcctccaactccatccatgttcctgcaaaggacaggaccccattcttctttagggctgcaaaatattctagggtgtatatgtaccacattttattcatccagtctatcattgatgggcattttggttgattctatgtctttgctattgtgaacagtgctacattgaacatatgtgtgtatatgtctttataatataaggatttctattccttcagatatacacccagtaatgagattgctgggtcacatggtatttgtctttaggtctttgaggaaccttcaaactggttgaactaacttacgctcccaccaacagtgtataagccttcccttttctccacagcctggccagcaccagttattttttgactttttgataatagcctttctggtgtgagatggtatgtcattgtggctttaatttgcatttctctaacggtcagtgatgttgaatttttttcatatgattattggccacatgtatgttgtcttttgaaaagtgtctgttcatgtcctttgcctactttttaatgaggttggtttttttccttgtaaatttgtttaagttccttacagatgctggatattagacttttgtctaataattaggccttctttgtattgaatatcatatgaatagcaattggtcagtcttctgatctttattttaacattaatgatggtcagttgtgtccaaaccacaaaagtgagggagcacaatgaagcctgttcaacctcccatcaaaccatggccagaaactcagtttttaaggtttctctggggttcccttggccaataggtatttgcctgttcagtcaattgggggttttaggattttatttttaattctcagtcttttacaaatttctactgattttgatccaaatactgccaaaatttagaattgtaattttaaaaaaatctaatgtcatttgattaatgaagtagttattcaaaggaacaggcccaaacatttcaaaaatcaatgtaattatatggtgaaaagagaaagcacatgttcatatctgtcatgcttaggatttcatttgtttgttttattcaatatcattttcagtgccagaaagtatagtttatttattctaattctgtgtgactatgtaaattcaaatatacatttgtgcattttaataagcaatggttatatttctagtttaactagtagattgtctcagcttatttgaacatgattaatgaattatgtgtgcacaaaaacctattcaatgtatgtatatactaatgtaaaaataatgtttttagcatgattctatgctatgtcaaaatttccatttatattgtcactataaaaacaaagatttaagattttgtgtttaaagctgaaatttttaacagaatttacaagagcattcatagtaatgtctcatgttccagcttcaataaagtaaacttaaaaaaattaatttggggcaaaatattgaaggataaaacaattgaaccattatcagaattaaataatattctatttgaagcttttctgtaattgatacaactggcataatttatctgtttaagaaagaagaaaaaaataacttacaacagttatttgatccaaatgtaaagtcatacttcagagtattacacatcaacacattttagtaactacaaagattaaaatattgttttctgaaacagtcctctttaggtaactaagaatgtttggagatatatgcccatattagtccattttcatacttctgggaagaaatactcaagagtgggtaatttataaagaaaaagagctttaatagactcagagttccacatggctggggaggcctcaccatcatggcagaaggccaaggaaaagcaaaagcatgtcttacatggtagcaggcaagcaagcatttgcgtaggaactgcccgttatgaaaccatcagatctcatgagacttgttcactatcatgagaatagcataggcaaaacccactcccatgattcaattgcctcccactgtgtccctcccacaacacgtggggaatatgggagttacaatagaaggtgagagttgggtgggaatgcagccaaaccatatcaatgccactttgtctttggcagacttacttcctctccttctcttgttctgtgactggtgtctccattagccccatggaagatgataaatataaacaaatattttgtgcatagtataactatatcattacttacttcattgaaataaaatccagtacttactttttaactataaaataaactttcattatctagctgattcttcagggtttattacaaaaggaaaaatttttataaaaccaaaatatgaatttaagggttgtataattatattgtatagttatagatttacgtaagacttgccaaacccaccacagcaggaaagttaactactcattatgtgtcttataactggcccactctgtctctctttcctggcatatattattcatgtttcccactaactcttgaataatggcctggtgatttcattcattgcacaccatcaatggcataagccgtgggacaattgaatagtaaacaagcatctgacagaaacagcagcattaaataccccttctactaccacccattatgggaacgaactaggtatccctaactatgtttttctgagcttattttgctctatcagtagatgtcttgcatacttctccaaacatgaaggtgtgagtagggtaaatgttattttgatttaaccatgttaaggtaaaaagtattttcattgcgtatgtatttatcaattgcttctgaatttacttaaattcaatgattaataaaaagtaaaaaagaaatcaagagcaaatgttaaaacagatgaaattctcactcccaatgagaacacatggacacagggaggggaatatcacacacctcggcctgtcggtggtgggggtttaggggaaggatagcatcaggagaaatacctaatggagatgacgagttgatgggtccagcaaaccaccatggcacttgtacacttatgtaacaaacctgcacattctgcacatgtatcccagaacttaaagtataataaaaaataaattaattaatttttagaaaaagaatgacttagggttagaaaaagatttaaactgggaggttgggttggagggagggcttagggaaagcctcattaaggagttaacaaacaaacaaacaaaaaaacagatgaaatttatgagaacacaaaccacaagggacacagagtcacccaccactacatcatcatattcttatttaagaagtagctcacattagtccctgtgaatcataaatgactttttcttctacttcatgtgattgttttccagtctcggtgctaacaattcttgggcacaggtcttctgctttttgtattggcatcaattatcttgcagcagctctgctctcagtcgtatccaggctgacactgctgtaagcagtattctgtagtggccagggttaaatcaggcatatgtaccttcctcccaaatatgttaagctttattgttagactgcacgctgggcagatgatctcagtttagtagtgttttatttttgcacatttactcagccattttatgttatgttatgttatgttatgttatgttatgttatgttatgttatgttatttttttgagaccaagtctcgtttgtcatccaggctggagtgcagtggcgcgatctcggctcactgcagcctccagctcccgggttcaagcaattctcctgcctgagctaccctgagacaaattcctggtgacataaatcagatgataatttaaatgactccacttccctattttaatcctgaatccctacgaatttgctttggaatagatgtcttcttttatataaatatgtctggggattaagagctggccgatattttctgacttctcaatcacccaacacatcttatcctggaccctcccacaaaagaagttgatgatttatgaaaattaaatcttaaggagaagacaaacatactttaacatgattgatttacacaggttataaggcttagattcttgacatggaagtatttgcacataaaccatggcagttcaatataaaaatgtaattcgtgtttctgtttcaatgagaaaataaggagtgagtcaaataaagttgcaacagtattgagatacattttgatacatgaatctaagttacttaagcaaataaagtccaccctaagaagtgtggtttgcggtagtaggaggacacagtttgttaaataggggagtagaatatgtacttagagctagagagtaataactcctatagcagttttgtaaatgagtggaaaaaggaataagtcaggcagaagtaatctcactaggaagtgattaaaacattctaaaagataggcctacgttataaatatagatttccaggtgtctgaagattctcattcgggggactgactatgtgtgtttttaacaagtggaatgctaatttgtttactcctcctgcttttaggaagttagtcagatagtcagaaaactacataagcatcccagaagtattgtaaatgagaggaccaagatctccatcacagctatggactaaaaaaatgagtcaggacctagtgtcagggaaggatagcaagataatttgggggtagaaagaaatggtacctctaggctgactctttggacaaatcaggtaatcaaggaggtcttggttctgagtcaataaataacaaaagttgcagtgacattctttagggaaaagtcccaagaaagtaaacaacaaaagataatattttttgacctgggacaccctaagctagtatcacagaaatgtgaggaatttattgtctcttgcattgtaaagaaccaatatgataagaagaggcccaagggcaagacagtacaaaataaactaatctttgagggggaagaaagaaatacctagagaaatgtttggattattgtaagaaaggtgaaggcaacactcatggagaagaggctgttatgataaaaaatgagacaggggtgtgcaccgtttgattgtaatatttaacagacatatgaccttgttttaccacagaaggcaaattaatgttgataatgcagcaataatgataatatcaataagagtttaagtatataaagcgattaatgtgtgccagaaacacttctaagtgtttagtaagcattgtctgataccatttttgttgacaattttgtgaataaatactctattatcttaattttactatgaaatatattgatggcaagacaatctacctacattaatcaaatttttggttaggtgattagaggtaggtaattcagttaataaaaaaaagacaaaacaaaaaataaaatgaatgtaacacttttaaaagactaaacgagagcaaaaaagggagctaaataggaagagttcgagttatgcttattttttaaatttttttattaagtacatctaactcatagtataacccattatgctataccactgtctcctgttgccagtgatctgtgttttatcttcaaacctagtcaaaaatataaagcaatgattaggtcagttgagacgatgagttctccatgggaaatcaaagcaatctttaaatgagtgtatcttttttgtttttttgtttgtttttttttgtttttgtttttgtttttttcagatggagtctcgctccgtcgcccaggctggagtgcagtggtgctatctcggctcactgcaaactccgcctccctggttcacaccattctccttcctcagcctactcagtagctgggactacaggccccgccaccctgcccagctaattttttgtatttttagtagagacggggtttcaccatgttagccaggatggtctcgatctcctgaccttgtgatccgcctgcctcggcctcccgaagtgctgggattacaggcctgagccaccgcacccggccaaatgaatgtatcttaattcctaaacatacagggcttcagcagtgtttttctgtttgtttagaagcttaattccactattagcagagaactacattgtatggtatcaggcctttggattctcttgagttttggtttatgatccagcatatgtacaattttggaaatgttgtttgtgtgcttgaagcaactgtttccattgcccttgccaattttatgtatatgtcagttagatcaactttaattgtgtttatcaaatcatctcaaacttaacattttatgtctgtttataaaatactgagagaggtacatgaaaaatttctcaagctgtcttgcatttgtgtggctttcctttcagttctgtaaacctttgtgttatcgaagttgaggttattctactatttaaaatttggaattgttagatacttttggtgagttcaaacatttaaaaatataaactttttccttactttttttttcttaaagtctcctttacctttaattagctgcaagggctttcttttggcaattgtttatgtgatataactcttctccgttctttctttcttttttttttttttatttgagttggagtcttgctctgtcacccaggctggagtgcagtggcgcgatctcagctcactgcaagctccgcctcccgggttcatgccattctcctgcctcagcctcccgagtagctgggactacaggcgcccgccaccacgcccagctaattttttgtatttttagtagagacagggtttcaccgtgttagccaggatggtctcggtctcctgacctcgtgatccacccacctcggccttccaaagtgctgggattacaggcatgagccaccgtgcccggcctcttttccattctttcttatatccatttatttaagatattcttcatgtaaacactatattgttactactgtagctagttttcacttttgcttttaatgcgagtatttagtcagttcttctgtcatagtaagactaatttgtttgtgattaaatctaccacattaccattcactttcaattcattccttgtgtcctatgtttctatttatctccctctttagctcttgttcagtattttaaaatatttttttaccctccactattggtttgttaattatgtgtaattattagtatagcatagaccctaaaaactgcaaaccacatccttgccttagggctttagaacccatttagtataatttttgctctccctcacctcttgcatgataaatattgtttattaagactcacttgagagcaaccttcaattcaaaacaactttttattgaagataatggttatcttacagtaaagtggagcattatgatcctgtaataaagtattgatatacacaagccagagggcctaatagtgagaagagggaccttgttattttctttatcaatcagagtattcaaacacatgcataagctggatttatctggggcgaactatgtgtcggatactttactggcctttgaagtttcaatagagagcaagagaaacatatttgcttccttccaggacactaaattctgatagagaaagagacacaagttaagtagatgcatatataacctagttcaaatgttttatgaattttatgaaaaaaataagcaaagggatgtgatgagcagaattatgggcagtgtggatggaactaatttagggttatctcagaaagcatctccgattagacctgtatacctcgggacaaaatacagttaactgtgcaaataggccaagtgtggtccatgcaagaggagagcagttgctcttttttccattcatatgctggatgaagataatcatgtcaaacttggatgtcacatggggaagatggaggaattcagcactgaagacctcaaataaacagttaaaggagagttccatttcaagtcagtaacacatattttggattttaccagagaaataaataaaatgtgcttatatttgagctattatatattttcaagttcactcattaaagctgtttgcaacaccttagctaaaattaatacagaagaatcttaattttatttatagttcaaatctattgcaaacttcaagcaatagcatgatacgattatatttatgatgcattattactctgaacaaaaagtggaaaatggataaaggcagaagcgagatgaaaacagaagaatggttacaaggttgaaatagtggtcctggctagaaatgatgatgtttcagactagagatgaggcaacaaatacagagaagagtgatacattttttattaccagtagtagtacttgctattaaaatttgttttccttaaatagatgtgcttctaaggctactgtaactgtgtaggttaagattagcaattgtttttgtgtaatagatatttccctctttaacatatactgaaaaaaagaagcatattaatttaactgttaatgtggttatttcacactactaatgggagagatgatggtttcacatgcacatgtacaatttgagaccatgaaaaaacatgtacaatatatgattttgtgcacacgctatctcagatgtgtgttttgttagcagatatagtcatttgctgattattaaaacattaatagcatacaaacaaaaacataaaggctcagcattttaactagaacttggtattgttgggttttaaattttattttaattttagccattctaacagatgtatagtatatctcattgtggttttaagttgtgcttctctaatgactaaagaagttgagaatttctttatgagcttatttcccatctgtatatcttctttggtgaattgcctgttcaaattatttacctatcttttaattgaattgtttcttttcttgatactgagttctgaatcttctggttacaaggcctttgtcagttatgtgatttgcaaatagacaattctctctgtatccatgggtgattggttccagaactctctgcagataccaaaatctgcaaatgcgcaagtcgcctatataaaatggtatagtatttgcctataacttatgtatactttgttgtatactttaaatcatctctagattacataaaatacctaaaacaatgttaatgctatgtaaatatttgctatactgtattgtttagggaaaacttacaagaaaaaaatgactgtacattttcagtacaggtgcaaccatcctttgtttctcccaatatttttattaagaaatttgctgaatccacatatgaggaacccatggatatgaaaggctggctgtatttttctctcagtataactagtttgtctcttcatccttgtagcagtgtatttcaaagagcatatatttgtaatatggatgaaaattaaacttgtgaatgctatttaaaaccaaaatgatatactggtacacaattagtagaatagaaaataaacagaatcagaaaacttacaataccaaccgttagcaatggtatagaccaacaggaattttcatacattgcttgtgggaatgcaaaatggtgtagacactctggaaaacagttaagtggtctcttaggaagataaaacccacggatatagcccagagatcctactctgtggcattatcttagagagataaaaattttctatgcacacacctactcatacgtacatacacacaaaaaacctggccatgaatatttacaacagttttatttgtaattgctgaaaacaagaaactctccaaatatgctcacaggaaaatgcataaagagtcgtaagagcaataaaacagaacaaactattgatacatacaataacattgattgattactttcaaaaacattatgctaaattaaagaggccaatctcagaaagttgcatattgtatgattccatttatatgactttttagaaaagataaagctgagaacagatcaatgattgtcaggaattatgaacggtggaaagtttgactataaaagacagaatgagggaattttcaggagtttacatcaaactattctgtattctgactgtgatagtggttacatgaatctatacatgtgttgaaactcactgaactctacatagaaaaatcaattttactgtatgtaaatataaaaatgataatgaaaaagtactttacaagaaagataagaaacaaacaaactctgaacagttttccccaaggcatgaaaatgagtccataatatgaaattcaatttgtatagattctagtacataaatgaaacaataatcaaatcctgctgtctatatccttgtttttttgaaaaccaaattctccagaatattgcatttaacactttgagaatcacattttattaattggtgttaaagaacttaaaaaaaagaggatatgggaaataacttagaaaattagtttcaaaaaatataataaaatataaacaaatacagtagtatactgtaattataatgtaatatttcttgtaacttcatgggaaacaatttaatgtctcaacctagttcatgtattcctcaaacatgtattcaacttgatggaaattttcctatgtattatactgtaatccacgagagtgggaagtaacaattctttaccatcttgctgtaactgggtaggcattttaagatgacgctaaagcttgtgtctctgagagggcattgtatgggagtgtgtatgcagaagttgagtgctgatgcagcagagacctcaggttcccatggcacaagacaataggcaatttaatttttctgcttgacacgccataaaacataaaaaatgcctatctatagacacatctgtattgcaaattattgtttacccattaccctctaccactagagtatgttccacaaaaagagtatagttttattcatttcattatcctcaacattctcaggttactgatatattgtatgctttcaatacaaatatatttcactaaatggatgactggatggtggataaatgaataaatggaataattaaataattaatgagttaaaagagcagtggcttttccccatttctctcttcctgtttagaatgccagtgggccacaatccattcagttaaattatagaatatacatattagtccagatatatatttgtctattttctaagatccctacgcatatattttattcttaagtatatttattaggtctatatacgtcatcttctggaacatatcaacaatatctataataaaaaattcaccttactaaagctacttagaacccattttctattttttttcttttcactttcaaatctgttatcttttgtaataagtaatttcctcccaggtacaggtgactcactttatttgaatcaaagtgacttcagtgttcaatctggattttgctgatgtgcctagtttcaaatattgagctagtcactttttggcagaggagactcgcttggtgccaagtaatttagaaagctaggaggaactccagttggaagtcaggcagagagcagaatcaggtgccaaattttcttttcctatcaaatgagaaagctggtaaatggaagtgaattttgcagacatttactactaggaacaaatgccataaaaggactgaaaccaaaagcttcttctagatggtggtcatagcagtcacttttataattctagtccttagcatggtgcctagctccgaggacacatccaattaggatgtgttgttcaactcagatgatatgtacctcagcagaatatcttacttcttttgcctccacatattaatccccttttcagagagtctgctactcagctgactgctgtgcacccccaaccactgccatgttctctagaatttgctatatctctttaaacttttcctctcagtatttctgacttaattgttagcaattgagttctacaagagttgcataaaattggaaaataactaattcccaatacatattcatcagtgtgattttatttaaaagcaaatgaatagcatcagatcatcatgctttccagagtcacagaattaaattacaagccctgatttaaattttgaaaacaaacaggaccaaaagaagaatagtgatttttaccccatattttatcaattattttgcagttacagagatgttttttgaattgtaatggaaaggttataggtaaattgccttttatttataagaatagtattttaaaatgatgatgaaattcaatcagaacacacttggaaaacattattttggataaatattaatatcgtccataactatatgataggagagggctacctcagcacctcttttgaacaaaagtgttctgaggcagaacgtggcatatcacaaattgagcccacaacaataatgtgcaatgctcaaaaacaaacaaaaaaatcttgtttaaaaattctcagcaccttgaattatgagtactacatttaatggcagctctaacttggactttggggttacttgggctcgagttcagaactgtgcctgaaaatgcatggaagttttttaaagcacacttaggtaacaagccaacattgtatagtggaaatagcacataagagcctatttaaatgcccagtatctcgccaagttctgcaggacacagttctccaaagaaagcgtaaagacacagccttcggttatcaatggctctggagcatgccatgttcttacctgaggcagtgcagttatacattctgggttaactacagggaatcccaggcaccctcttttcagaatatgcaagcccttataataccttgaaggtccacctttaaatttgctttttccttgagatttctcactcagagcatgtgctgtcttctttccatgttccattcataagacttcatggacatattgcctatggtagatgttgaatgatgttataggtcattttttttttcaggttttctatagttactgtgaaatgtgatgtcaagaaaagagaatggactttgtacagggaatcagggctttagatcactgcttctaatggacaagtcagttaacttctatacttctcaatattcctttaagtatgatttgggggatacttaaataaaattatacaaaaccatttataatagtgtgggcagtggttgagaggctgtggtctagtcagaccgcaggtatgtagatcttgtttgtgccatgtgggagctgtccattctaaagaagtttatgtaactcttttgggtttcagttttcacacccatacagtggaggctatgataatatatatagcccatggaatgatttaaatgaatatcacatttaaaagtataaagctcatttatcacaatgcctggtgcttaatatgtgcttaaaatgttataattattcttcagactttttttctctgtgtgatcttgctttgtctactgatttttcaacttcttactggtagagggttataaaataatgtcaagcactgtatgtaatgtaatggcagaagcacaaatttagttaggggaaaaacgacaggggtcctctgactcttttcttctaattgttctgcctctagcattaccattatcagtataattagcttaataataagttataacagggtttttagattgcattcatacatagctactcaatcaaatgtttttgttggaggttttctaggacctctatttatctagtgttcaaatcaggattttcaataggtgaagcgctcttggagcagatcttttcatacaggaaatcaattaattagtggcaagtctggctcccttttgagtaaaaaagaatgaagctttgagtgtgattccgtcttcactgagtttgtagagcatttgtccacacaactgctattttatttgaactgaatgcaactgtatttatcaaagggaagacagtgcaacctgtcaaggtggactgactgcctgctctttggagtgataaaagctagagttcctggattttgtcagttgtcaaagcaaacattgttgcagatcactgctttattgattgtagtcccacccctattgtttctcttttaaaaaaatctaattgactttagatttgtcatacaggcatagcttcaatctcagaatactatgcaagtaaatatcacagtagctaacactcaataacatttagttgactaaacaatataatagttctccaaatttacagcgtctgctattcttgacactaacataggtctaatacattgtacttcccttcttctactacgtaaacataagcactgctgtaataaaattcttcagctactgatttgcccaaatattttggcattgcccagttgcttagtgtagttaattaaaaaaaaaaaaactaccctaggctgtattccttagaaaatcagttcttatgtgtcaggtaccttgctgcattatttccaaggtttaatatagcctctgaagttggaatgatggctttaaaatctcatctgaatgtagatgacaatgataacaataccaaactcatggggttattataatgaataaataaagtgtagatagaaagcacttagagtagaggtgagcacagagaaaagtagtggtgagcatatagatatatcttaaatattgttatcattaccattattatactgtattatattgtaataatctctactatcccattgtaatactttcatataaagcactctatttaaatatgttataagaatatatacatatgtatacatgcacacgcatatgtgtattacataatattatactataatagtaattgttttcattttagagatgaaacagttgaggttaggaaagttaagaaacttaccagtgtcacaagggatgtgtgttatggagctaagactcaaagccaagcagttaaccatgataatgctttaccacttgaacaatgcacacatactctgtttttccagaggagattcttcctctaataggcatatatcataatttgaagaagtaagtaacaaaaatcatttccagttcaataaaggcaaaaaatattttaaaagaaataaagtgagaaggagaggctggcaatactacagttaaaaacccaaaggcccaagtggctggtagttaaattaatacaagtatgtaaaacaggttaggtgtaagaatgatgggtttcgggaggtggaacttgcagtgagccgagatcgcgccactgcactccagcctggctgacagaacgagactccatctcataaataaataaataaggaatgatgggtttatggtcaagtagagagcatgaatgttggtgatgttgatccttatcatgtagagatgtgaatacaccatcactaatttctcacaaagcacctaccatccacatatttatttgaaaacactctgatttttaaaacagaaaattacttcaagatgtataaagctctgtggagtctgagtaaagcatttatgcagatggtatttgaccaatgggccaccaatacgcaatccttataaatattttctggaactacaggctcctgagtgatgcatttcttgtaaacagctctatattcttaagaactgaacactgttgaatgatatctgcccataattaagttcctcaaacatctggagccttacctactgaagaaattccacttgcagacgcagcctaccccaaatagtgaatacctggcagtcaagctgggaaatgaaagggagttctagcctcacccagctgggaactcttacctagtcttacttttccaagtcaaaacaggatgctgtggactagagttttgggcggtcatacggcacacatttcctcaccatctcaacctgtaaaatattgcgtcaatttctcgtattctgttttgtcattctttctcgatttacttggactggaatgctgcaataaacatctctctacttgattgcaatcctgataaaaatttaaataattccctgcccttttgcctactgtctctagttgtttagaatcttacttaatcctaaatagaacgccctaggaaaacagacattattccccaactcatgaacattgactctgcctgtagaattctacagtagaagcacagccacctgattggccatctttgtgttgaaggtagaaaacagacatggcttgacacacttacttagagtatgctttaatatgttactcctactcgtatcacactttttgcttttattgttctatatgtatagtcttaagctatttactgaaatgtatagattttttatacacagggcccatgtaactattaaactgtgtcatataaaacaaatcacagaattaagctagaaaagctctctgcttctattttattatttataattattatcatgagttttctaaccaataagtcaaaatacaggtatttccggtggcgtttggaatattggaaagtttttctatttccaatggcaattgcttctagtgttattagcacctttaatcagctcactaattttatccttgagcctccaccttaggttctaatttatactcctttccctgaggttacaattcttgcatgtattgcaaccaacaccaagcaatttatagcactgttaaaagaaaaaaactgaaatcatattagttgaaccttgaaatgaaaattaacaaattggataacctagagtgtatagttttaggttagatgttaccatatataccatatcctctaattcatctaatacaatgagcttaaaatgcctctaaacacatctgagaaaatgtgaagttttgacagcatatacaaaaacttcttttcatttcctaaaagaaaatgaaatgatcccaggccaagatggaaaacattctaatcatggtatacagcatcaattttcttaccaggacactcagcaacatagccagaatgatgaattgaattcattttattttttatatgccatcacttaaaccaaataccttcaaaagtgagggacaaaataatgagataacattcattccatgctttgaagtgaaatttccaattctcgtgtgtcccagcagattgatctgtgatttctttaagaaagcaacaagatagataaagtttatcctgctctattttttcccatttcactttggcttttgcttttcattctcaatcacatagaatttattgtaaggaggtgatgcaaggaagggaagatggtgatgccaggaggagagcgattgcagatattttagttacaactagggactgaaaactaaggattcatgctctatacttaattcatggaaggttgacagtagtgttgggtgaaaaccaatgctttgtgaatgtctggttagatctctgttgaaaactagcaaagttattttctagtttttaaaagactgtcagatcaaaagggtaatgtaaatgtttctacctctttaatgtccgtgttcggaatacaacggcactctactgtccttcaaagtgcgataaaaaaaactccttgtaataccctagtgaggccaactgagttactgatagcccattggaaggaattttgcattactccagagtgtactgatacatgacaaattttgcagtccatcagtaggaagtatgaaggtctctttctaactgttgaactggtaactgattgacaattttcaaaatcaccaccccccacacaaaccaacactacatccaactctttaagaatgagaagaaagttttccaactcttagggaactcagaaatcacattaaagtacaattgttatgtgtcacctgctagctattacttattataataaattgaaaccatcttttaaagaacatagcaaaccatcttttatcaacaccttttatcttgtgattaaatatgagtgatgggctcttttaacacttatgttccttataaatattgctttcaccttgggcttaatcctgatattgcataatacttttccttgaagtcaagtagcttgaaattgtacaggtattgtcaagcacggtcagggaagggcaaaaatggagtactgactatttttacacagaaacaccacctaggaatcataatatttttttccttaagacttcttcaaagattattcaaaatcaagtcacgtagttacgtttgccatttagtctatgtatctttaaaaaatattattgtgtaatatagaactcgagccttgttgtagaattctttctgttaatgaatgcttcagcactaactattgaaaagcaatttatttttatgaaactctaaggatcagatctcagaagccattatttatatgatgaacctatgactttccaaattgccttgaagtgctatacagaaacgcttttcttttgccttttgtagtttttttattactgtatcacatgttgctattcatcatgaaaaacaaatctcaaagcagaataggtgggtgctattaaatatttctgcgtatatacatggcttgctttaaaatttacattgcaatatcttacattaaattgtgagtgaatgaattcagtaacataaaggcatttcaactgtaaaaatacttcaaaatttattttcttatattctaaataaactttaatttatttaatccattaaaaaagttgcagattttaaaaagaaactaaacctatgtccttttcttttaagctctgtttatgaaactttcttgaattaatgttgctatctgtgtttatttgacacaaacatagagaaagattgatagattttaagctccattattttgtagagggacttttctttcctaaaagagttccaaatatattccaaacatatctctcagaaaaattttaaactacacttaactctcagaaagatttcagaagttgttatttatcaccatttacagggtaaaattcacaggaaacaaattaagatacccttctcaggatatattgaaaatgtaattggcatgcctcttatttctagtgattagctgccttaaaggagtacaaggtagattaacatgttgtggaaacaatgatcagattgcctaagccaattatatggaaagtctacctgacacatggttttccaatgagaaaacacatttgaaattggatccatgctgaaatagcaaagacatgatgataatgtgtatgtacagtgccatatcattgtgaaaatccagagagatgcacaaagaaattcatagaattttgtgttagaagcataatgtaatcttcatgtttatcatgtgaacttcatttttaaaataaaactgttatatttgctttcaagcttgacatagtaattcattattttggaataatggattttataatattatttatatatatggttgatccttgaacaacacgttaagtggtatgaatttacttcaatgtggatttatttcaataaatatattggaaaagtttctggagatttgtgagagtttggaaaaaaactcacagatcaatcacatgggttataaatttgaaaacttaagaagtaaactatgacatgaatgcataaaatacatgtagatagtttattttgtcatttactactataaaatatccacaaatctatgataaaatgttaaaatgtattaaaacttacagaaacaccgaccatacattataccattataccatttacagttggcagtaatgtaaagaaatgtaaagatgcagtattaaaacataactgcataaaattcactgtaatgtatactctactactgcaataactttgtagcaacctcctgttgctactatggtgagctgaagagttgtaggtatccaattaaaatgctgtgtgatattaatcatttctgtgtgagcaatttgtctttccagtaaattgcatattacagcaaaaagtgatttatcctggttctcacatatttttcatcatgttaagtgcaatagcacaaaccttgactatcactatggaacccaagcaaagtaccactagtgattctggaagtgctcccaagaagcagagaaaagtcatgacatcaagaaaaagctgaattgcttaatatgtacattgaattggggtatatagctgcagttgtccagaatttcaaaataaaaggatcccacagaaggaccattgtaaagaaaaacaaatagaaaaaagataaaaatattcacaaagtcattgctgcagctatccaatagggacaaaaatcttgcattgttttgtgaaatactttttaaaaaaatcttgtattaaaaatgcagcttttatgaggctgcagaatagctataaaaaagcatacctacagactctaatataacctgagaagaagcaaagtcatcatatgactacttaaagcaaaaagtaagtgaaagatataaagctggagaattcaatgccagcaaaggatggtttgataattttagaaagaggtttggtcttaaaaatgtcaagataacaggagaagcagcttctgctgaccaagaagcagcagatgagtttccagataccgttaacgaaatcattgagaagaaagaatatctgcatgaacaggtttttcatgcagatgaaagcgccctattctggggaaaaaaaagtcacgaaggacatttactagttagaaagagaaatgagtattagagtttaaggcagaaaaagataggataattctactgcttgtgcaaatgcagttgggtttatgatctggactgtccctatctatgcctatctatgtagtcaccaacccttgagtcttgaagagataaacacaagctgctattcttctggttgtataacaaaaaagcctagacaatgaaaatccattttctagattggttccattgatgctttgcacctgaagtcaggaagtaaccagccagcaaggaactgtttcttaaagctcttttgatgctgtacaatgcccctagccacccagaaccccatgagttcaacaccatgagtgtcgagttgtctacttgtccccaaacacaacagctctatatcagtctctagctcaggatcataaggacttatagtggtcattacacatggtactctatgaaaaggattgtcagtgctatggaagacaatatcagtagcaagaacattataaaattatggaaagattacagaactgaagatgtcatcattgttacagaaaaagcatcaagccccaaacaacaaatcctgctgaagagaactttgtccagatgttgtgcgtgactttgcaggatttataacagagttaatcaataaaatcatgaaaaagattgtggatttggccaaaaaaaggaagtaaaagatttcgagatatggttcttggagaaattctagaactaacagacaccacaccagaggaattaacacaatacaacttgatggagatgagtgcttctgaaatagtgccagatgaacaggaagaagatgtagaaaaagcagtgccagaaaacaaattgacattagacaatctagtgtctaatgatgtaagagaagatgatctagtgtctaacaacaatcagagttgacagactgattgttttagagtgcttttgacttctctcatgacatcaactattctatgatatgtgcactgaaactaaagcaaatgatggaagaagggtttgtgccatatagaaatatttttagagaaataaaaaagcaaaagtcagacagaaatcaggatgtatttctgtaaatttacactaaatgtgcctgcctcttcttgcctcctccctccatttcctccacctcttccatctctgccacccgagacagaaagaatagtccctcctcttcctccacctccttagcctacttgacctgaagatgatgatgataaaaacctgtatgatgatcaaattccacttcataaatagtacacatattttctcttccttatgattttcttaataacattttatctagcttacttcattgtaagaattcagtatataatatatataaaacataaaaatatgtgttaatcaattatttatgttattcataaaacttccagtcaacatatagatgatataaatataggttaatgtagacttatcttcataaatctatatgtaaatttttgactcctcaaggtggtcagcatccctaaactctgtgtgtgtgcacatgtatttattatgttgacttggagatcaaaatttcacaagtcatatttcgaaaggatgatacaagatagataataagattatatttacctgctaaaaacacatagaatattagtgtgatagtttataaaattaaaatcttccttaaatatcattttaaggataaatgaattaaactaaagtgattatcaaaagttaaatagtatatatgtttctgaactcaattccagcccagctcttctcctccatctaagttcccatacccagctccatgacatactgaaaagtttctgcattctaaccagagtagatcgcattcatgcttgaaatcagacagtattgttatgtgattcacttaaaaggtaagcttacttaaaactatccagtggctctagcttcacatgcacaaaagatgttctatatgttcatgagtaatgggagtgaaatttaaatagttacattaaagctccataacgacataattatattagtgaaatctaataaataagaaaaggaaagcttgcttccacaaaactacacctgggggtaacaattcatttatgcctagaataattaatatattacattaattgtttaaaaaaataagaataagcccaatggtgcatatcaaatacattgtataaatacaagcaatattaacatccatttaaaaaataaaaaaattatttttatttcctgaggtatttttttgacaattcaaacggtatcatctgcttattccctttctctcttttctttcagaaacctacattttgctttttgccatggaaaagcatcctaattactcttcctttacatttcagaagtaatcttttaattttgatggcaaaagtgtcttttctttctgtctcgtatttcatgcgtattttcttactacccacatgcatttgttctagtttgaaatcatttcactttatgatcactttgagtattgaagttacaaagagaaggttgtcatgaccagatatgttattcttacctgcaaaagtcagcctagaagcatctagggccccattgctgagttattgggaaaagttgtaatcatatagttttataatgatccagatttttaaaatatgtgaatcacattatcatttaagtaattatatttctaaactgctatttcctttgtgacttcctaggatgtctagagaggtgaagcaaacctacttagaatctctattatctatgccttgataatgtttcaaagacctttatatacatcaaaacattagaattcatataaatttgtccagatgttttacaaatattgtttcactcaaaacatgtataagtatgttattaaggaagaaaaaacctctcaagggattaaattatacagtctcttcagcaattatttgtctataaataaaatcatttctgttgctaaaactgctcaaatgcagttagctctccttttcttcctctctctcaatcctagtaaaaggcaaaaagccttctgtttcttccgtttccagcatcatgtctttctctccttacatctactctttactctgccttttaaaatacttttaaatttagagccaaatttttactttctacatactttctagcatagaagagaaccttattcactttgcagacctcatcttctactcaagcatcttgccttcaactagttatgtaaatatttgataccttctctgttcctcttagggtataacagttgagtatcagaaatgatgttatgtgtgccttttaacttacttctcaatatagcatgatacatgacagatgtcatctaataaaaacatttgatagtcatatccttcttttgaaaatttcttgtttacattatagttttcaaattattttattattccaaaccctgtctccctttcacttccacccaagctctttaacattttcttttctaacttccagaacttaatcctcactaacttaaaaatttttttttctttccataggttatttaggaacaagtggtgtttggttacatgagtaagttctttagtgatgatttgtgagattttggtgcactcatcacctgagcagtatacactgcacacaatttgtagtcttttatccctcgcccccttcccatcctttcctcctgagtccccaaagcccactgtgtcattcttatgcctttgcatcctcgtagcttagctcccacttgtgagtgagaacatataatgtttggttttccattcctgagttccttcacttagaatattcgtctccaatctcatccaggtcactgcaaatgctgttaattcattcctttttatggctgagtaatatatcatagtttctttatccactcattgattgatgggcatttgggttggttccactttttgcaattgtgaattgtgttgctataaacatgcatgtggaagtatatttttcaaataatgacttgttttcctctgggtagataaccagtagtaagactgctggatgaaatggtagttctacttttagttatttagggaatctccacactgtcttccataatggttgtactagtttacattcccaccagcaatgtagaagtgttccctgttcaccgcatccgtgccaacatctattattttttaattttttgattatggccatacttgcaggagtaaggcggtattgcattgtggttttggtttgcatttctctgatcgttagtgatgttgggcattttttcatatgttcattggccatttgtttatctttttttgagaattgctaatgtccttaacccactttttgatgggatttttttttcttgctaatttgtttgagtttgttgtagattctggatattaattctggatattagtcctttgtcagatgtatcgattgcaaagattttctcccactccgtgggttgtctgtttactctgctgactgttcttttgccatgcaaaagctctttagtaattcactcccagctatttatctttgtttttgttgcatttggttttgggtttttggtcatgaaacacttgcttaagtcaatgtctagaagggtttttccactgttaactccagaattttatagtttcaggtcttagatttaattccttgatccatcttgagttggtttttgtataaggtgagaggcaaggatccagtttcattctcctacatgtggctttccaattatcccagcagcatttgttgaatagagtgttctttccccactttatggttttgtttgccttgttgaaaatcaattggctatgagtattcaggtttagttcttggttcttctattctgttccattggtctatgtgcctatttttataacagtaccatgctgttttggttgaatgtggactgataatatagtttgaaatcaggtaatgtgatgcctttagatttgttatttttgcttacttttgctttggctatgtgggctaatttttgattttatgtaaattttaggattattttttctagttctgtgaagaataatggtggtattctgatggagattgtgttgaatttgtagattgcttttcatagtatggccattttcacaatattgattctacctatccatgagcatgggatgtgtttccatttgtttgtgttgtctatgatttatttcagcagtgtttcatagttttccttgtagagttctttcactttcttggttaggtatattcctaactattttgttttatatattttttgcaactattgtaaaaggggttgagttcatgatttcattgtcagtttggtctctgttggtgtatagaagagctactgagttgtgtacattaactttgtatccagaaactttgttgaatttttaaatcagttctaggagctttctggagcagtctttagggtttcctgggtaaacaatcatatcatcagcaaacagcagcagtttgacttcctctttaccaatttggatgccctttatttctttctgttgtctgattgctctggctaggacttccagtactatattgaaaagaactgatgagatcaggcatccttgtcttgttccagttctcagaggaaatgctttagacttttttccattcagtatgatgttggttgtgagtttgtcataggtggcttttattatgttgagatatatcccttgtatgccgattttgctgagagttttaatcaaagggatgctggattttgtcaaatgcttattctgcatttattgagatgatcatgtgatttttgtttttaattctgtttatgtgctgtatcacatttattgacttgcatatgttaaaccatccctccatccctggtatgaaccccacttgatcatggtggattatctttttgatatgtttttgaatttggttagctagtattttgttaaggatttttgcatctatgttcatcagcattattggtctgtagttttcctttttggttatgtccttttctggctttggtattagggtgatactggcttcacataatgatttagggaggtttctctctttctttttcttgtggaataatgccaataggattggtaaaaattctttgaatgtctggcataattctgctgggaattcatctggttctgaccttttttggttggcaattgttttcattaccattttaatcttgctgcttgttattggtctgttcagggtatctaattcttcctgatttaagctaaaagggttgtatctttccaagaatttatccatctcctattggttttctagtttatgtgcataaaggtgttcatagtagccttgaatgatcttttgtatttctgtggtgtcagttgtagtatctcctgtttcgtttccaattgagcttatttgaattttctttcctcttttgttggttaatcttgctaatggtctatcaatcttatttatcttttcaaagaatcagttttttgtttcatttatcttttgtacttttttgtttcagtttcatgtggttctgctctgatcttgattatttcctttctgctgctgggtttgggtttgttttttttcttgtttctctggttccttgaggtgtgaccttagattataggtttgtgctctttcaaacttgttgatgtaggcatttagggctatgaattttccttttagcactgcctttgctgtttcccagtgattttgataggttgtgttactattgtcattcagtttgagaattttttagattttcatcttgatttaatttttgacccaatgatcattcaggagcaggttattgaattaccacatatttgcatgattttgaaggtttcttttggagttgatttccagttttattcaactatggtctgagagagtgcttgatataatttcagttttcttaaatttattgaggctcattttgtggcctatcatatgtctgtcttggagaaagtaccatgcactgatgaatagaatgtatattctgcagttgttgagtacaacgttcagtaaatatctgttaagtccatttgttccggggtatagtttaaatccactgtttctttgttgactttttgtcttgatgaaccatctagtgttgtcagtggatcattaagatcccccactattattatgttcctgtctcatttattaggtctatcaataactgttttataaatttgggaactctagtgttccaaacttcaggtgcatatatatttagaattgtgatattttcttgttggacaaggccttttgtcattatataatgtccctctttgtcttttttaactgctgttgctttaaaatttgttctgtctgatgttagaatagctactcctgctcgctctggcatccattcgcatggaatggcttttgtcaccccttcacgttaagtttatgtgagtctttatgtgttagatgagtctcttgaaggcatagataagaattcttatctattctgcaattctgtatcttttaagtggagcatttaggccatttgcattcaaagttagtactgagaggtgaggtaccattccattcattatgccatttgttgcctgtataccttgcttttgttttttaattttatttttattttataggtcctgtaagatttaaagtggttctgttttgatgtgtttccagtatttgtttcaagatttagagctccttttagcagttcttgtagtgctggcttggtagtggcaaattctctcagcatttgtctgaaaaagactttatctttccttcatttatgaagcttacgttcactagatacaaaattcttggctgatcattgttttgtttaaggaggctgaagacagagtgccaatctcttctagcttgtagggtttctgctgagaaatcttctgttactttgataggcttcctttataggttaccttgtgcttttgcctcacagctcttaagattctttccttcatcttaactctagataacttgatgacagtgtgcctaggtgataaactttttgcaatgaatttcctaggtgttctttgaccttcttgtatttgggtgtctatgtctctagcaaggccagaaaagttttcctctgttattcccccaactatgttttccaaacttttagattgctcttcttcctcaggaacaccaattattcttaggtttggtcgtttaacataattccagactccttggaggctttgttcatattttcttattcttttatttttgtcttttgttggattgggttaattggaaaaccttgtcttcgagctctgaagttctttcttctgcttgtttaattctattgctgagactttccagagcattttgcatttctataagtgcattgtttcttgaagttttgattttttttaatgtataccatcaattttattgaaaatttctctcatttcttgtatcttttttttgacttccttaaattgggcttcgcctttctctggtgcttccctgattaatttaataactcatcttcttatttacttattcatttatttattttttgagatggagtctcgatctgtcacccaggctggagtacagtagtgcaatctctgcccactgcaacctccgcctcctgggttccagcaattctcctgcctcagcctcccgagtagctgggactacaggtgcccggcaccacacctgtataatttttgtatttttagtagagacagggttttaccatgttggccaggctggtgttgaattcctgacctcaggtgatccgctccccttgccctcccaaagtgctgggatcacaggcatgagccaacatgcccatcccaaccttccgatttctttttaatgtaaatgggatttattcttggtttggatccattactggtgagctagtgtgattttgggggagtgttaaagaaccttgttttgtcatattaccagagttggttttctggttccttctcatttgggtaggcactgtcagaaggaagatctagggttcaaggctgttgttcagattcttttgttccacgggatgtttccttgatgtagtactctcccccttttcctagggatgtggcttcctgaaagctgagctgaagtgagtgttatctctcttctggatctagccatgcaacaagtctaccaggctccaggctgatactggaggttgtctgcacagagtcctgtgatgtgaactgactgtgggtctctcagctgtgaatgccagcacagtatttggggtgcctcctggtgcttcaggagcaatccacttccttcagagggtctgtgggttctctccaaacctcactaactttaatggcattaatcaaatggcaattgcttcatggtgcctcaactttttgtaaaaattgctgacatctgtgtgtttacctcacattagccagtttccactgaagtcacagtgggacttaagaaacactagttccttctagatcattcattttataattctgccttctaggcacaatctgcctacatgatacttcactgaaattcatcttctttaatcattcaactcactgcattgtacaatgtgcatatagatccttgggctatagagatcaaaaggtgtttaattcttcatgggtgtcatggaatttgtcctcagaaaggactttagggtcattgagttgaatattgaccttttacctgaagctccctttgctgttttgaacttcttgcaaatcttttgtgctatcctttgaaacctagggtgtaaacaaggaattttcaaatgaaggctacaactatcaactatatttatcagatgaaatttgtcaagatcttttgtgctactcccccaaaaaccaggatcttcctctactccctaccatgtccttaatggtagtgcccaccctggctctgcatggcttcattctcagatatttgattaacatttttagagcccagggacagtggaagaaggtggagacacagattgatgtcccaagggatctaattcttttttttttgtattttctttttgttataacagagccctgtccagttcaccatagtatacatccccattttcctaaatataaacattcatcattctaaactaaggttagaatatcagatacaacaggaaaaccttatctttgcttcttttcccctgtgaagtgcactgtgtgctgcttgttgctgagtgcagtcctgaacgttctatatcataatttcttaatttgtgagtagcagagctctgtgttattgggagtcagctgtgcttcagaaatgaatctaatatgatctctccagaatgcatacactcatctgtgaaacactatgcacgaaagtttgctgtaactgtaaaactgctcccaatgctcccccaggctgggtctttgtgtattacacaaagagaaatgactgacttgggtgaacaagagcttttaaaggcaaagcattgttttaaaatcctcaacttgagaaatctatttttccctacctgatatttaaacattaaatattacaaaagtatgtaccctctaaagaattctccctttaataattcatttataatactcccatttattaaacattatacacggggatcataataccttgagctatgcatgtggggactcatattagtaactgcctcattctcaaagtcaaatacaagatatcaaatacacagtcttgtgtttccaaagtggccacacattatacttgcttacaattggatatttttaaaatacttttcccccctccaaatataatgctttgttagccccacatctttgttattttgtcgcacttggagtagcttagtcttcctctttgttatcagtttttatgtattcttttacagtgaacctctaaactaatcatctatttttgggtgcttgtctggttagactccagtggatcagttcagaatactcaccactcattgttcaccctatggctgaagagctgattgagttagaagcaacactgctgtggtagtaaataacctcattagcttttctgaaatgtacggtaagaaaaacttcagtagcaatttgtcttaaaactctataccctctgcaaaaatttcaagaaagatgtggacagccagtatgtatatagctgatgaacagtcagaatcaggattccaactaagcttctttggtttgtgagcattgactggaaaacaggtaaaggaagaggcttttgagatcaagaagatatgagcccagttttaaatagtgaaaaagagaagacaggctgagtgctctctactgctctcaaacaaagcctattgtctctcataaagtttactacaatagtccctagtactactttctcaaagagaaaacttagtagaaaatgcatttggggtcaaataattgataatcggaggttgttatcggatgtcaagtcttaactgagatctgggaagccagtctttaaatttatgtttacaaaggccgatcacttagcaattcaataaatattcgatttataaattaactcttaatgtgttccacaaccagagtccattctttattcaaataagggggacctacactataagtgaacagacattactaagcggagataaacaacaacatgtcaaactacaatttttctaggacatatgagcttaagtaaaaagctttctcacttaaaaagagactaactcataatttgtaggacgtttgtgagaatcaaatgattgaagaagtgaaagtgcttcatgatcagaagatgtgtcataaatacatgttaccaaagcacactggtttaaattaaaaatgggtcttctcattcccattgccctataatcacgcattctatctcttttacttagaatgccaccttatattccatggcataatctaaacagccagttagtacctatgatatgcagttaagtaagaaagacaagattccaggtctcatgggctgatactctaaatagcttatcaactttgtcccataaagaactattttcgaatgtgcaatgaaataccaggcaactattttagtttcccactgaaaaaatattgatatctgggcgattagtatgaaggagaatttaggatgagtcagatcatatttatttatcaatttatctgtgcatacattcaccccatcaaacactccctttgctgttgacttgctttatcatttaacacctatctgaaatgcctacacaatgtgaaggtctagttcgtgtctcatctctccaggcctcacagatctttgcttcttttgaattcctatgaactatgcagcctgtattgagtggtcagaatgcaattagccaaatataatagaatttgttgttgtttgttctgaatacataattggtaaaatgcagactcctggtgcaggtggggtgcttgcgagtggagctcagtattacgaatttttaacaggtacctccatgtaattttgttgtagataatctgcatataatatttgagaaatattgttaaagagaactttccaaattagtgtcactatgttactgtcagaagtataaaataatagctgtctgcaagtatcagatgacaacattttataaacttgccctgtagagaaacatggataaagacaagtcataatagatttctcacacacacagaaatcgttcctcatatactaatgataaattgcataatgttttcatttcatagttgtattctccattgagtagcatagttatcaaagaataattgatttgatagtgggtgattctgttgaatcctccaggaatatgacacattttggaatgaatcaacttcaaacaataatcattttatttgtatttagtgttcctgattatatattttaattatgaaaataaatgaatagtctttctttagaaatgaaataagggaggaactgaaggagcatttgtaactctataatccattgtatttttcacatagaacacatgacatttttgtatgattttccttacttttgggaaacaatgaaggagttgtagttttcgattgtgaatactttctaataaaattatattgacgatccagtgttctagtcattgacactgtagcagtgaacaaaacatcctgatgtaacctggatagaggtacaagcctgaaaccagtttcacaatttctgtagtaaagtaataagggagaataatcagtctgagatattacagaatgcagagttataaatcaacatttaatttcttcccattaatgcaaatatatatttcagcactgcctctctgtcaggtattcagagataaagatacgatatgcaggccgagtgcagtggctcacacctgtaatcccagcactgggaggccgaggtggatcacttgaagtcaggagttcgagaccccatctctactaaaaatacaaaaattagccaggtgtggtggcacatgtctgtaatcccagctacgcgggaggctgaggcaggataattgcttgaacccaggaggtggaggttgcagtgagttgagcttgcgctccactgtactccagcctgggtgacagggcaagaccctgtctcaaaaaaaaaaaaaaaaatgcataatccagtccttctccttaaggagttcactgtctagtggtaaaaatcaacaattagagcatggtgttaccagtgttataatacagcccatacatataacaaatgtatgtcttgtttttaaaaccataagtattctactgtgcttgaatcaaaaacatgacacagactattcttttgtgaatagtacacaaacaaagacatttgacctcctgtctgtgacaggaatatcaatagcagaatctttttcttagttgctgtcaatactcttccctgtgctaagatgcaggccatgctgctgctgtcccagcagtcttttggcactctcctcgtggccttatcatgcagtgttccctactggtgtgggaaggaagccctttttccaccttagagtcaccatccattgcatggttttttagtaaaagaagcgctctcaggaacttttatgtgaatttgaattctatttatttatttattcattttttcaagacagggtcttgatctgtctcccaggctagagtgcagtggagcaatctcggctcactgcaacctccacctcatgggtttaagcgattttgctgcctcaacctccaaagtagctgagacttacaggcatgcccaccacgtctagctaatttttgtattttcagtagagacaagtttttgccgtgttggcaaggctggtcttgaattcctgaccgcaagtgatccacccacctcggcctcccaaagtgctgggattacaggcgtgagccactatgcccagcctgattcgagttcttaaggtttcagagagcatacagtcataaaacagtctcaggaaggactccaaaagtactctgtatctccactaaatggagcagtcctgtaagtctgagtccaagtagctacttttcttagatttactttccttacagaggataacctggtctgtctctcaaattgactattttcagaactgctacaccagacctctcgacatgcacagatacacctgaatctgcaagtgaaaattggaggctccgggtaggtttccttctcagtgcccatcaacacatttgctcatcttccacaaactggtcaaagtctctggtccaaatcttcgtgatataggttttaaatccccactattgatataggtattaaatccccactactcacttccttccctccaaagaaaaagtgagattatcaaatgcaacccactcccttttatgatgttttcaaccaaataatctttgtgctttgagaaataagcaaataaaagcatacagaaatatacagacattcacaggacctgcaggaaacttaacaagcagtattaatctgttcccatgctgttatgaagaaatacctgagactgggtattcataaagaaaagaagtttaattgactcacagttcagcatgactggggatgcctcaggaaacttacaatcatagtggcacaaggcaccttttcacagggcgggaggagagagaatcagtgccgactgaaggaagaagccccttataaaaccatctgatcaccaggtatggtggctcacacctgtaatcccagcattttgggaggccgaggcgggcagatctctagaggtcaggagtttgagacaagactggccaacatggtgaaaccttgtctctactaaaaatacaaaaattagctgtgcgcagtggtgggcacctataatcccagctacttgggagaccgaggcaggagaatccctggaacccaggaggcagaggttgcagtgagccgagatcatgccactgcactccagcccgggtgacacagtgaggctctgtctcaaaaaaaataataaaataaaaaataaaaccccaccagatctcatgagaactcactcgctatcacaaaaacaggatggggaaactttccccatgatttagttatccccacctggtcctggccttgacacatgggtattattacaattcaaggtgagatttgggtggggacacacagccaaacgataccacagtgcatctccaaagcacactagacatggagcaattaggcatcacttacaaatacagtgatagaggaggaacttctttgtatcttctccctaaaatattactttcatcttttcttgactcaaatttctttacttgccttgttagtgtatagaggatgggatttgaggaatctgtatgtgcttgtttcattcctgttttaagagcacactttgttgacctggctctccccatggtggtgcctggagtgacactgacaaaaaaaatagaacttagggatgttcattcaagaatatatcagctgcaccctagggaagctgaatgagacagtacggttgctagtttgcatagaaaagtggctctcaaaatgtgatctctggatcagcagcagcagcattgcctcgttatttgtaataaatgcaaattatctacctttgaactcagatatactgaatcagaggttcttggggtgggacctagaaatctgtgctttaataaacctcccagtgattctaatgcacactaaagtttgagaacaactataaatatatatgtgtaaagaaagtctcctgtcagatacttgcctgctgtttacatcatcctcagtgcctccctttttacttagtaaagattgttcattagacttccatcttagttcactatcttcactattatgcctcattaacattgtgttataattagttatatcactagggggctttatctttccagagacagaggtttaaactatgcagtcagctctcttcatcagaccttttagtcaaccatctcatagactatactgggccctgtttctgtctgcttattgtgtgttactacttttcactgctgatcattcctcactgtgcttcagatgtttcttttgtaaaaataataatgacttggctttttcttcatttcctgttttgactttttcttacttatatattaataacatgactgacatatataccctttacagggagatatataactagcagaaaaaacacaacaccacatttccctaaattaaaaaaaaaatcaaacaaatttattataataagggttttttaataagattgtttattactatttattgtattgatttatgcttttcattcatgttatttctactacaactacctctaccttcaatacctactttaactcatactaacatttcccctcaatattgatgatccttacttctctaagagactttaaacagaactctccattcaactactgcaaatgaagcaataatttttgacccctttaatatctttttcaagccattattatatttgtaatttaaagggcataatttaacattgtatcattattcatagttttaatataaagtctatgcactagtacactctcttaattttatgccatttttctttgatttatcataatatcaccaaagaccacaggattataaaataatacattgtcaaattacctatgttactgcaattctggttttctttttggctgtatccattctaaaagctcttctctttgtaaataatttccgataccttagctatcagtagaataatcttagagaacagccctctggtacactattatatcaccacttctacctccctaaatggtttgtccatgctgtcttattttccgccacaaatggaaagccgctatagtgtaagtaggtggttaattagttaagaaggtgggttctagagtagtacaacatgaatgaaaattgcaatgcctgaaatctagcatttgtgtggccttaggcaagttactcaacctcataataccttagtctctttgtctgaagaatgaagacagtcattgcaatcactgtacagaactgttgtaagcatgaaatgtgttaatgtgtgtgacacatctggcacgttttaagcattccaatctctagctatgattacatttcacctgctaaattagcacatcattacactggaatcattcttgtttattttggtgacttagattaaacagagaagctgtgaggatcatatttcaatacttaattttatatggttagtaatggtaaccataatgattgacaccacatgactcatttaccattccagaaatggctcatctgaaccatttatcttctgctctggggaggcattttatcctgtagtgttgtacttcaagtaagcctagattcctagatcccatttgagaatcattatattgggcacatttgactagggtcaaggcttatcgtggtactattagacgtctccaaatatctgtcttttttctagcgtagggcacagttaacgaacaagatataagcaagtgccatcttggggaagcaaaattgtggaaaaggcaactgaccataaaccatgtcaaatcagatttattagcaagtagtccacccctactaaacaatatcaaataactggtttgcatgatttaccagaaactgcttaatttgaataattatttagagaatgttaccatgttagaactgtattattatattttttcaagtgatatataacaatataacacagaccatattttctggatctgaacactaagatttcaagtatcacaatagcccatattgaattaccttaagttgaaatgtaatacccatatcaaaaaatatgccagcataaacttcaggtttctcattggctaagtcaactttattccagtctgtcaaatcacatttattatttttcctggaatcacaattaattaaggtaacatttactaagacatgttaaataaatgaatcttttttccaaagcaatctccttcactatagatgttttaccatgtaatgataaatgaaggcagtagaacagatgcccaggaaaaagactaagtttgtccttactctagaaaccatttaaagcatctatctatggctttttgaaattaaactataatgaaataaagataagaactttgagcagttgtatataaaattaatttttaatatggaatggttaatttgagtaattcatacatgcaaataacagccaaccagaaagctctggagttggctttcattaattaacctagatagaaatcaaccagttagtcatatcctcaaattctgattgatgcttcattacctacaaagacaaaattaattttatacttatgccaggacaaatgataacagagaaaaataactagtttcatatgtattattaacttttatgaattaatccattccacaagtatacaagaagggctagaagataccagtttacagggtggtaattaacaacttttagacctgtgtgctttacagagagttctaagccacatgattttatttaattcccacaaaaacactgggaagtaagggttattttaaaatactactttattgatacataattttgcccccatcttaagtatatagtttagagaattgtgacaaatttatacaactatgaaacctccaaacagcaaatctaagaataaatacttaattctgtgttatgactccacattcattgacatttccattatctcatgctgcttctcattttattccatttcgccttgactattgggtgagaaagtacatatcaaaatgtatactttgatagatttttctctttcaaagtaaaatttaatagcttttagcattatttcagctgagctgtttgtagaaatgaggtttataatattaagcctgaaaaaacactacaattttctgtttgcataattgtgatctgatgtatttccaaaagtctgtttgttgctgtcattggtactggtggtgagtgctgtaagatcccagtaataaacagtactggatatatcatctagaaattaattatgtgtgttgcatttgaaagataaactttaaaattcttcttgtacacattttgcagacatttttaagtgcaaagagaagaatctgctactctgtcccagccccttatcttcagaagcaggtttttattcaagagctctgtgatgtctactgtaagtgaaaagggatgaaatcagcaaacaaaagacttgccttcctggctcagttctgcttggggctctgttatttagctttcttttttctttcctggcagatgctatgccaaacacgatacatgttgtcctagattgggttccctagaagcaaaatctccagaattcctttgtatgttttagttgtgtgctctcaggataaacagataaacaagtaaaggaattggggtaggggaagtggaaggaatcatgcacgtatctagacataaattgaacctgagtctgtccctccttgaggcaagagagcaaggcctttatagtttactcactgcccaagacgtttttgaccacagacaccttggagtaagataggtggccaacctcccaggtaactttcagagaggtgacttcaactacccaagagcaattcctgcagataaagacattttccaaagcatcagcagtggctgggtgatgagcataagaaaataactagaaaaggggaattatagaggagtggttgggtggggtagagcgggtggggtcaggcattcaacactgctatcacacctgtactacctttttctgttgtcaacatatttttaatacctcatccactttacaggaaacaaagtaaggccttaagaggctcaacaagttgcctggtggtcacatggtcagccatagtagtgctagagtttgtatcttctatttatgtagctccaaatgatcaacagaaaagaaaaataatcttctaaaaatctaaaacaggcaatagattatacagatgatagatgtgcccaccattcatattgctgctattacttgaaaaatctattattctgactgtacttaacttgctattgcagggaccctgtttccatccactgaagcctcccgaatactttctttaagcctcactttgatatatcaagagagctctgggaagagaggcaggatggtggactagacccagtccagaggaatatctgacaccaagtgactgagggacagggacattgggaagactagtacactccaaataaatctttgtagggaaggtattgagtggacagagggaggaaacagacactaggctgaagggagaggaagctgggaactctgcatggggctactgtgcagcaggattccttcctgtcccccagcgattcctggggaaggagtaagttgaacaagcgaggaatgatctgctcttgcagggacttctggaatcctggcagcaggagatcccatggcccctgtgaacacttaagctggcagagagaactgcttagaagtgttaggggtgggaactgcagtggagcatggccagctatgcccatcctgtaaggcccactttgcttccctagaagacttgagcgttagggctagcatataggaatgcaattgagttacataaacgttgcattcttattctcttctatactcacttattagttccaggatttttcttggtcatttatttgaattttatgcatagaaaataaaatcatctgcaaattttttcttcccgtcttggcttgccttctcatgctcctgacagtaactttcacagagtagtttttaattttaatgaagttcagttgatcaattatttgtttcgtggattgtatctttgtgttgagtctaaaagtcattgccagacccagggtcactgaaatttttatgttatcttctaggaggttttcactttatatttagaatatataacatgtacattccgttttgagtgaatcagattttactatttattttattctgtttttcattagacttaaatttctcttcatttgcttttttcctgaggtagaagcgtaagctttttattttagttatatattttctaatatgtaaatttaatgctatgaatttatctctgagcacttttgctgtatcccatgctatttttaagttgtctttctgttttcactcagctcaaaattagtttttaaaattaacttgaaaattctttgacttatgtgctatttagcagtatgttgtttaatttccatggacttggatttttttttcaactgtttttatggattaaagatacacatgcaggtttgttagatggctaacaggattaaagatacacatgcaggtttgttagatgcttagggtcccaaagaccccatcacccaggctgtaagcatagtactcaacaggtggttttttaggcaatgtccccctgcccccacatttggtggtccccactgtctgttgttcccgtctttatgttcatgtgtattcagtgtttagctgctactcataagtgagaacatgcagtattttgttttttgttctgtgttaggttgcttaggataatggcctccagctccatccatgttgctgcagaggacatgattacattcttttttatggctgcgtagtattaaatggtgtatatgtaacacattttctttatctaatccactgttcatgggcacctaggttgaatccaagtatatgctattgtgaagagtattgcaatgaacgtatgggtgcatgtgtctttttgatagaatgaattattttccttcgggtatataaccagtcagtggcattgctgagtcgaataatagttcaatttaagtatttgagaaatctccaaactgctgaaacaaaccaacaagaataaaacaaaataatctcatttaaaaatggacaaaggacatgaacagacactctccaaataagacatacaacggccaaaaacataaaaaaatgctcaacatcaccaatcatcagagatgagaaactaactcccatcaatgagatactatctcacaccaatcagaataacaattagaaaaggtcaaaaaacaacaaatgttggcgaggctgtggagcaaaggcaatgcttatacactattggtgggatacatttcttctctatttcttttattgatttctagtttaattgcaatgtgatctgagaacatatgtgcgtagctttcttttttaaaacatttgttaagttgcattttattgctcatttaatccatgttggtgaatgtttcatgtgagttttggaagcacgtgcattctgttgttggatgcaggtatcaatgtctattagatgaagccagttagtagtgcttttgaagtccactctatccttactgattttctgcctgcttgatgtatcaataactaaaaagaaggtgttgaagtcatggactatggtagcagatttgtcaatttgtctttgcaattctatcagttttttctcacgtactttgaaactctccagtttggcatattcatgtttaaggttgcatgtcttcacagaaaatgactgagagatcattatataatgcccctcttttctttgttcttaggtatgctttatctgaaattagtgactccagcactgctcatattaatatgagcatggtatttctttcctcactcctttacttttaaactttttaagctttatattcaaaagagtttaaatattcactctaaatatctttttattttaactggtttatttcgactatttaaagtgagtattgatatagttggttaatacattcgatttttgtaactcctctttattcattgcatttgttctttggttcatttttctccttcctttgtatgctttcttgatttaaatttagcactttctattattatattttatctgttctcttaacatatcacttacacttctttttaatttttaagtttttgtttttagatagcatctctctctgttgccccaggctggagtgcagtggcatgatcatggctcactgcagcctcaactcgcttctctgccctgagatcaatggatcctcccacctcagcctcctgagtagctgggagtacaggcacatgccaccaggcccagctaatttttgtattttttctgtagagatgggagtggtgttttgccatgttccccaggctggtcttaaactcctgagctcaagtgatctggcacctctgcctcccaaggtactgggattacaggcgtgagtcactgtgcctgtcctctttttagtttttttattgtttgccttaaagtttccaataggaatttttaggtagcttaagtccacctacatataacgttatgccacttcacatataaggcaggtacatgataaaagagtattcctaattcttcttacctgtccctgagactttgatccctatggcattgcttacaattcattccacttatccatattttgtaatcacccagtacattgttaccaatattacttcatacaaataattaacttataaataaagaataggaaaaaaaaaccttaatctatcatcatttattctttcccccgaatccttcctttcttcatgtataacaggtccaagtttctgatggatagcattttcctttttctagtgaaattcttttaatgtttattgaaaggaagatctcgtaaccataaagtccctgttttgtttgtcagataaagttatgatatctcctttacttttaaagtataattttgtaggacatagatttctaaattgctggggattctttctttcaatactttatttcaactccatttctttcttgcttgcatatttcctgatgataagtctgctgtaatttttatccttgttcctttataggcaagatgttcccctcctcaccagctgctttcaatattttctctggcttcaattttttgctatctaagtatgatatgtgtaagagtaattctgcaggatttatactatttgcttttctcagagcttcctagatctatggtttgatatctgtcattatttttggaaaggttttgtctattattatatcaaatatttctcctgctccattctaagtttttctttttctgctattccagttttatttatattaggttagtgtaaaagcaatagtgttttttgccaagactttaaaaaaatggcaaaacagcatttacttttgtaccaacctaatatattagttacatatttggaaattatgctgtagatcttggatctgtttttaactttttaatttttatttttgactttgaaattcagtttagaaactttatttttcatttttactttttctccctttatttttaactgatatatgataattgtatatatttatgaagtacatagcgatgctttggtacatataatgtatggatgtcagatcaggtaattagcatatccatcaattcaaacagttataattttttgtgttggcgacattaatatcccccttctagctatttaaaactctataataattatcctattgtcatcctacaatgctatagaacgctagaattcctcctattgagctgtaactttatatcctttaggaaatctttccctatgcttttttcccctcaccctccacagtctctggtgtcctgtgttccactttttacttctatgagatcaactgtctttagcttccacacatgagtgagtacatgcagtgtttaactttctgttcctggcttgtttcatttaatatgttgtccttcagtttcatccatgttgccacaaatgacaggattttattcttctgtatggtagaatagtattccattgtgtgtgtgtgtgtgtgtgtgtgtgtatgtgtgtgtgtgtgtgtatacatatatatatatatcacattttctttatccatttatctgttgttggacacttaggttgattccatatcttggctattgtgaatagtgctacaataaacatgggcatgcagatgtctctttgatataccgatttcctttctttggattaaatacccaatagtgggtttgctggatcctatggtagttatatttgtggttttttgagaaaccttcacactgttattcattgtgtctatgctagtttacattcccaccaacagtgcataaacatttccttttctctgcgtccttgccagtagttgttactttttgtctttttaataacagccatgctaaatagagtgaggtgataactcattgtagttgcctccagaaatccatcaaatctaccacttaagtgttctcctcatttaatattctagtggcatctgctccaggtaagtagtttttagctatgactctctggatttgcctgtctttccagatttcagggtagcagatttccctgaaacctcagttctctgaaggctccaagaaaagttgttgattttcagttgatttagtctttttttcttattgtgaggatagcaatcttctaagctctttacatattggagctgacactaaaagtcctattatattatatcataaatcagtccatgaatttatattatttgcaactgaaaaattctaggtgatattgagtatagatttgtaaagatatattgagggaaatatgagatatttgcaattgactggctggaatgcacagtaagtgatttatctgccaacattggagatggaatctgtaaacccataatatgtagagggaaaatggtgaattcttatcagctatgtctgcctggacccttttgaccatttacatcaacactctggaaatctgcgtactggctaccgctaaaccatataaaatagataaaaattccgaggggaatttttatgtttatacctggagtttttatgcttatacctggaggcatgaaagaacaggttcaaatgtctaaggttttacttcaaggaactaatgggaactcaggaatattatatgatttttgttaaaaatactttcttttacttaggattcctgtactgacatcagtaaaaaataaactaaatgggtcagttctcctttttttaattacagaaattttctagtattacatactgatacaatttccagaatttcatctctacttaagcatctctctctctctttctctctctctctcaataattaatggaaaatgcagataaggagtgctattgtactcacagggaaagttttcttgcataaaacatagcaagctctagtcaaaaattaaaagattgagaaatacgactaagttaaatccaacaacaagaagaatgaatctccagttttttttatgtgaaaccttacagctaatgaaggagtaactactgtaaatactccagataatagagaagtaatgaaaaatgatattcttatattccaactagatgtggagttagaaggcatatgtaaaagaaaggctgcagaaattttgaattaaaagaaagctagaaaaaagaaaatgaagcaaacattgcccaaaagaaatatgtgtaactatattaagttgcaaagaacaatactaatttttggagacagaaatagatcagtaattgcccaaagtgatgaaggtgggatggtggtagggaagagtttgaccgcaaagggaaatggatgaacattctgggatgaaggaagtgattaatgtcttgattttggtggtattgcacaggtgcataatatcttaaaacttctttgagagttacacactagatgtgttcatatcattgggtttaaattgtatcttaataaagttgatttaaagagaggagagagagatgacttctattgttttaagtaattaagaaagaaaaggcaagtcaatgagtgggtgaaaaatgttacattacatataatcaacaaggaactcatgtacagggtatataaagaaattatatcatcattaagaaaggaacaacaagcccaaaaaaataagcaagagatttcaaaatgtgcctcacaaaaggagtgacccaaattgcaagtaagctataaaaagttgtttaacctctgagaatattgccatttcaaaccacagtgagaagccattactcagtcttcagaattgctaaaattaaaaccagactgtaaagtgataaaaattttatatgctgctggtgggaatgtaaatttgtttaaatacgtaaattgataatttggaaaactggcattatctaatgaagttgaggaactgcataccttgttactaagtaatttcataacaacagagatgcatgcatgtatagaacattgaatataaataggaatgtttaccagcaatatttttaaaactagaatagaaaaagtggctaacaaagtatggcattgttatggcctcaatatctgtgtttctctaaaattcatacattgaaatcttaactccccgtgggttggtatttggagttggagtctttgtgatgtaattagggttagatgaggcagtgagaatggagcccttaagatgagatctatggccatgtaagaagaggcaaaaagagcattgaggaaaggtcacctgagaacataaggaggaggccactctgtgaaacaaaagaagagagccctcattaggaaccacatcagccagcaccttgatcttggacttcccaaccttcaaaactgtgagaaacaaatttctgttgtttaaacagcctggactatgatattttattatagcccctatatcagtccattcttgtgttgctattacaaaaatacatgagactgagtcatttaacagttctgcaggctgtacaaatgtgggaccagcatctgcttggcttctggtgaggtctcaagaagcttttactcattatggaaggtgaagtgagagaaggcacatcacatggtgaaaagcaggagcaagacagaggaaggtgaggagggactatacctttttaaatagccagatctcaggagatctcattcacaaaaattgcgaggacagcaccaagggaatagtactaacacacttatgagaaattctcccccatgatccaatcacctcttaccaggccccacttccactactggggattacaattcagtatgacattttggtggggacaaatatacaaactagatcagtccctcaagctgacaaagatgggcatattgctacaagtgtactatacaactctgaaaataaagaacaacatggctacatctcacaaacataatgttgcatatacaagaagctaaacaaagaagaatatatattatttcattttaatttatagcaaaagagtagtaaaagtaagttataatatttagggaagaaaatccagatattaaaataatgaaaaagtgaagaatggtttcatataaaagttagataaagattatttttgtgtgggaaggaggagataatgattggaaaagagcatcaaaaggtttccagggtattgtcaatattcttttgcttgagtagggttgtggttgcatggtctcaactttgtgatgaatccccaagttttatatgtcaggcatattttctgtgtatgtcataagaaaaaggtgaaaagaataaaacaaagtgtgatggttaatattgagtgtcaacttgattggcttgaaggatgcaaagtgacgtttctgggtgtgcctgcgaggatgttgccaaaggagattaacatttgagtcagtggactgggaaaggcagacccaccctcaatctgggtggccacagtctagtcatctgccagcccacccagaataaaagcaggcagagactgggtgcggtggctcacacctgtaatcccagcactttgggaggccagggtgggcagatcacgaggtaaagagatccagaccatcctggccaacatggtggaaccctgtctctgctaaaaacacaaaaattagctgtgtgtggtggtgcacgcctgtagtcccagttactcaggaggctgatgcaggagaattgcttgaacccgggaggcagagcttgcagtgagccgagatcgcgccactgcactccagcctgggcgacagagcgagactccgtctcaaaaaaaaaaaaaaaaaaaaaaaaaaaggcaaagtagattatgtatgtttcagcatttataaactgtaaaagtgtaaaaatataaactaacaccataataataatcctctgatacaaaagtatatatgatgtgtgcacatacagtacacatatgcatctgaaagaaacatactcatgaactttatcaactgtactggacagtcctctgatggcttcagagatgataattatacaaatgtggtatataagcaacatagttattgagaaagaaaaatatgaataattatacctcttgattttcttcactatgtatttcactttcaagacagtttatcactttataaattccactgcaatgattttcagtccagtagcttgtgccttctaaattaatgtcagaattagatttttctttctgataatattcaggttgaattgcgatgaattctaagagaaactacattagtctatggcaaattattctcaggctatatgaagtgtgtcattctttttcccaagcagagttgattttattcaatatggcatatctcaatgcttttaaaatccaaggggaaattatattttaaattacttaagggaaaaaagcagcattgattgacatcaaggattaactgttcctacataagttaatttattttaaaaatgtgaaatatctctgtgctgatgttggtgtttgacttacaactcaaatgttacaggtatattttgtgaacattatgcaaatgatgacccagaattaatcagctaataacatttatgaaccattgtaaaaacattaattgactaattaattcgacaatatagaaagttttacatggcaaatacgacattcttgcactgtcaagctgtttcctggagtagtgctaaaaaataaaaggcattaatttaaacagcaattgaaaaagtgtatattaatctctttctctgtgtaagaatctgcagtgaactcagtaagcaaaaaaagatacacaaaacagacttctccccagtggttcacaatgcagtcttgagaataaacacaattgataatgtccagaattgcaccactatatacttatgtagtactttaagtgttttacaatttctgatgttatataaaataaccccacagagcccagggattagggaagttacatctttgggagaatcatttttctgccaaccaaagaggggtagcaagtagatgacataactttcttaaattatccctctcccttgttaaggagagatacgttgcctaagagcctcaggcagtctttctattgtaagccatttaccagatctctagatctggcatccccaaaatgcaagggagatggagaaagccattttctagctttttcatcttctatagcaggaggcatacaacacaggtgtaaatctacccccaggatctattatacagtggtttttcatggtttgttttcccagaagaaaataacagaaacatgttgtaaatatttaagtagccaaactcttttttatgtctggcctttcaacagattcagtcacatatgtaatgtctcaggaaataaaatatttacaaattttccctgaaacagcatcctgaaggtgcactccagcctactgaaaaataaagagggatggctaacagtaaattaggttgagaatttactatgtgtggaaactgttccaagtgattaatctgtttaattatcaccatacttttataaggtagatattatacttactttcatttgcaggtaaaaaaaaaaggacagaaagattaaatcatttattagctcctatttagaactgatataagaattcaccaaagattccgtatacaaaataaatgtatacaaagcagtagttcttctatacaccaacatagaccaagctgagaatcaaatcaagaactcgaccccttttacaatagctgcaaaaaaacaaaagcaaacaaacaaaaaataacttcggaatacacctaaccaaggaggtgaaagacttctacaaggaaaactacaaaacactactgaaagaaatagatgacacaaacaaatggaaacacatcccatgctcatggatagatagaatcaatattatgaaaacgaccatactgccgaaagcaatctacaaatgcaatgcaattcccatcaaaataccaccatcattcttcttagaattagaaaaagcaattctaaaattcatatggaaccaaaaaagagccctcatagccaaagctagactaagcaaaaagaacaaatctggagaaatcacattacctgatttcagactatactatgaggccatagtcaccaaagcactgggacttaattacactaaagagcttttacacggcaaaaggaacagtcagcagagtaaacagacaacccacagagtgggagaaaatcttcacaatctatacatctggcaaagaacttatatccagaatctacaacaaactcaaacaaaccagcaagaaaaaaacaatcccgtcaaaagtggctaaatacatgaatagacaatactgaaaagaagatatacaaatggccaacaaacatataaaacatgcccaacttctctaataatcagggacatggaaatcataaccacaatgcaatactgccttactcctggaaaaatggctataatcaaaaaatcaaaaaattgcagatgttggcatggatgcagtgaacagggaacacttccacactgctggtgggaatataaactagtacaaccactatggaaaatagtgtggagattccttaaaaaactaaaagtagaactaccacttgacccagcagttgcactactggatatccacccagaggaaaagaagtcattatatgaaaaaaaatacttgcacacacgtgtatagcagcacaatttgcaattgcaaaaacatggaactaacccaaatgcccatcaaccaatgagaggataaagaaactgtggtataggccaggtacaggtgcagtgtctcacacctgtaatcccagcactttgggaggctgaggccagcggatcacctgaggagctcaagaccagcctgaccaacgtggagaaaccctgtctgtactaaaaatacaaaaaaattagccaggcatggcagcacatgcctgtaatcccagctaattggggcgctgaggcaggagaatcacttgaacccaggaggcggaggatgggatgagccgagattgcgccattgcactccaacctggtcaacatcagcaaagctccatctcaaaaaagcaaaagcaacaacaaaaaactgtggtgtatatatatataatcgtacatatatatatataattatatatataatcatatatatatattccatcatatatatatgatggaatactacttggccataaaaaggaatgaattaatggcattcacaatgacctggatgagatgaagacaattattctaagtgaagtaactcaggaatggaaaaccaaacattgtatgttctcactcagaagtgggagctaagctataagaatgcaaaggtgtaagaaagacacagtggactttggggactcagggggaaagggcgggaagagggtgaggcatgaaatactgcaaataggattccgtgtatatcactcaggtgatgtgtgcatgaaaatctcacaaatcaccactaaagaactttctcatgcaaccaaacacctctggttcctcaataacctatggaaatttaaaaaaaaattaaaaaaggaaaggttaaatcatttctttttcttttatactttaagttctggggtacatgtggagaatgtgcaggtttgttacataggtatacatgtgccatggtggtttgctgcacccatcaacccatcatctacattaggtacttctcctaatgttatccctcccctaagtccccaccctctgatgtgtgatgttccctgccctgtgtccgtgtgttctcattgttcaactcccacttatgagtgagaacatgtggtgtttggttttctgttcttgtgttagtttgctgagaatgatggtttccagcttcatccatatccctgcaaaggacatgaactcatccttttttatggctgcatagtattccatggtgtatatgtgccacattttctttatccattctatcattgatgggcatttgggttagtcccatgtctttgctattgtgaatagtgctacagtaaacattcatgtgcatttgtctttatagcagagtagcagagtgatttatgatcctttgggtatatacccagtaatggaattgctgggtcaaatagtatttctggttctagatccttgaggaattgccacactgtcttccacaatggttgaactaatttacactcccacaaacagtgtaaacgtgttcctatttctccacatcctctccagcgtctgttgtttcctgactttttaatgatcgtccattctaactggggtgatatggtatctcattgtggttttgatttgcatttctctaataaccagtgatgatgagcttttatttgtatgtttgttggccgcataaatgtcttcttttgagaagtgtctgttcctatccttcgccccgtttttgatggggttgttagttttttttcttgtaaatttgtttaagtttcttatagattctggatattagcctgttgtcagatggatagattgcaaaaattttctcccattctctaggttgcctcttcactctgatgatagtttcttttgctgtgcaaaaactctttagtttaattagatcccatttgtcaattttggcttttgttgccattgtttttggtgttttaatcatgaagtctttgccgatgcctatgtcctgaatggtattgcctaaggtttcttctagggtttttatggttttaggtcttatgtttaagtctttaatccatcttgggttaatttttgtataaggtgtaaggaaggggtccagtttcagttttctgcatatggctatccagttttcccaacaacatttattaaatgaggaatcctttccccattgcttgtttttgtcaggtgctgataccaaagcagatatatagaacaatggaacagaacagaggcctcagaagtaacaccacacatctacaatcatttgatcttagaggttaaatcatttctttaaggtcacacagttataagtaataaagattcaaatctagcaattctaggttcaaaactcatagtcttaatcataaaagtataatgcttggtaaaattttttggtgcctgtaaaattaccaaataaaaactagaagatatttggtgctatggtctgaatgcttttgttcctccaaaattaatgttgaaatctaatcctcattgtggcagtattaagaggtgggccttcagcaggtgattaggtcacatggggaccacccccataaatgggattagtgtccatacataagaggcttgagaaagcttactgttccttccatcatgtgaggacatagccttttgccctcttgtcatgtgaggacaccgtgagaaggcaccatctttgaaggatagagtgaggcctcaccaggcactgaatctgctgccaccttgaacagtaaattgaagttactgctgtaaatttataaattacctcgactaagatattttgttataacagcctgagaggactggcaattggatatattcagtgtgtatttaagaggtgaggtctgggctggagatagagagtttaaaatatggaaccctttgcagataagcatctaagggaagctgatggcaagagtatggaaggaacataacaagctagaaattgggaagcagagtgcagtactggagatcatttaaaaaaaatgagaaaatggcatagcaagtatcaactcagaagttgggtaggctcagaagtaacaagagtacaaagaattatatccaatggctttgggaggccagaggccaaaaataaacctttggtaacccccaaaatacatcagaaaaatgataaaaggagacataggaacaagaattaatgccagcaatcagcaattgcaccacctacactcacgtagtactttaagtattttacgatttctaattctcttccatttttttcctcaactaaatgagtataaaatgtgaaaggaaaacaagtatctccttgttcattctaggagcttgtgtctgcttcttattaaggtagtagcctgatgttcacagggggagagaattgaaaacacctatctctacagccaaaatagtcactaaacatgaacagttttggaaatacgcctttcaccataggagaaatacaacatttgaaagcatactgatctatataacttgccattgaggaaaaccctggagattcttcaagttgttattgctgcttctgttttaactgaaatcttgctttgtattaatacaacggtcagaaatggccttctagttcacttaacactgtaacatggtcatctttccatgtccatccatataattcagtatcttcttaataaaatcagcacttttaattcctcctaaaagtcctgtaggaaagcctgcttcatattctggttcatgcattaagaacagttagaagcattcagttatcaatggacttgcatatggaacatttcagacactctttggacttttctgccatgttttattaacgttaactcccagtattatgttagaatagatttcattttctctttatgtcaattacattgactgacagctgcaatgagtttcttagtaacacctaggggatgcttaggtttcctgctttactattcttccaaatattgagaacctgtcattaaaaagtcatttatctttcttttctgctgatgaagaccattttactgtttacctcacatttaatttgccaaatacaataagacttcagattttgcaaccactgataccatggatttttaaagttttttttttagttataatcttgagttcgcaatgagagatagttaagatagttaagattttttcataagttctatgatggctattttctctgtctatatgaaatcaaacaacttttgtaagtattgttaataaatgactaattatggaaatgtaccaaaattgcaggctataggctcagatttgggatttctggaaacagaattaatcataaataactgacctatacacatctataaagatttacctttatacttggattgtatgccaagtatttactttgaaaataatttgagaagttaaactacaaatttgtttccttgaggcctaagtgttccaagaaggtattattcaaccttattctcaagctctcagaatctacttatccaccccgatatccctttgcagagcttatttttatttttctttgctgctgaatgagaatatctctaatgttacattcttctgtcccacatgctggacctcgttgtttaactaatacgtctatcattgtggatgaaaaacctaatggctgagcatcaaaggaggaaggcattttcaggaaaggaaaaaaaggttatggaaagaaaaaatgcagcaggaagtattataaaagtaatgttctaacagacatgtatagtgttccagatattcctaagacaagttattgttcaattaatgttatatttctttcctcttttttgtttttctagttgtacacagcacaactctgaggagtttaaactaaccagttacgtgaactttggcaatttactgtaactgatctgcgactcacttcctttatctgaaagaaagaatgggaaaataagtgtaactaccctgttcttttatgaggaataatatataactagattattatatgtaaagtacttaggacagtgcttacatatagcaagcacataatcctcattgcatgcaattgacataaaaaaatcaatcaacacaggctattccaggatagttttcttttttaaaaaataaattttaagttcagggatacatggcgtgggtttgttacataggtaaacttgtgtcatgaatgtttgttgtacagattatttcataacccaggtattaagcttagtacccattagttatttttcctgatcctctccctcctccgctctcctgtgtgtgttgttccgtttatgtgtccatgtgttatcatttagttctcacttataagtgaaaacatgcagtacttggttttctcttctttcattagtttgctaaggataatggcctccaactccaactacattcttgcaaaggacatgatctcgttaatttttatggctgcatatttttctattataaagacacatgcacacgtatgttcattgcagcactattcacagtagcaaaggcacgggatcaacctaaatcctcaccaatgatagactggaaaatgaaaatgtagtgcttatacaccagaataattttcatttttcaattcaaattattttaaactcaatttggcattttttgacataggatatatagtcctctaattataatctgataagtataaaatacaggagcaaacatagtaattatgctagttcttcatttctcatctctgctcctcagattcattccccacccttgcaggctctattttatgcaaaaagatatagaacactgtcgcatacatcacctgaattccctggaaacctggctcccattgtgcctggaaaatgaaagtcaccagcagcagatcacaaaagggaggagagagaggttgggacaatcccctcccctaccccaccgcttcttctcttccttagcattgtctctggcaagcagaggcaatcaagactacagtctagctgagagtcacctcttccataattccagtttggctcctctgacactattttctttctggtatcttctgctgtttaggtgaaaccagcttcatagagcttccatacttacccgtatgaagtactcagtttaaattatcttcctttaagtcacctggaacacattacatctttactcttctattttaatatggtatgactatgtaattgctttcatattgtagtgccaagacttatagacaagtgatttttaaatctatgatcaaacatgttttccagttgccaattactgtttgaaaacacacacttggccttcttctattccaatcactgtaaatgaataaaatgtgtttgcaaacaaacatccttcaagtaaaagtgctgaattaattatacttatgatttataattatgcatacaggtcagcctggcaagggtataagcccaagagtgacaactagtcaatgtagagaggggtgtcataagaacaaaaatccagttatagaaatagaaaaaaaggatagtcagtagatagtatctagcaggcatggtataccacgggtataaatcctgagagaaaggggtattgaggaaactatacataataatagatgacaggtgggcagagccttaaaaaggtaacaatactgaagatgaacagtattttgctatgaaaggtggtagaaaatggccgaagagaaatttgtcagtaggtcttcaagttcacccattaggaagtcaagaactgagatctggcctctggaccttggaaggaggttgtcaaatggaaggcaaacaccttggcatttatgaagtgtccatattccaaagaatgggagaaagagagtgtgagaacaatccaggggcccactttccagaacaggaattcaagattacagaaaacagagacatacatcataattatgcagtgaaacaaattatcataaagtgaatgtttccaattaacctccaccaaagtaaaaactcagagcatttccagcaccataaaaaactccagctcctccctaatcactatgctcccttccaatattcccacatctaacaatataaattaagatggcctgttttgaattttatacaaatgcattcctgaaatatatattattttgcatgtagcttattttatcaaatattacattgtgataagaatccatggcatagcatgcaggtgcaatcaactcctatacagtgctacataatattccattatatgactatataatattccattatattccattatatcccattatatcattatatgatacaatttgtttatgcatttttaactgttccactactgatgaacagtttctacactttggagctattaagaatataatgtttttataaaatcattttatataaatttttatttagttatatctattgtgcacacatgaatagaatgattgggtcataacatatgcacatgttgaaccacaatagataaacagttctctcaatggatgtactaatatctcctcccactaacagtacatgaatgctgtcagtttgcttccttgctgggatttttgttgctctttttttttttttttgatgaaatattccgataagtttgtagtggtatctcataatttgtcactataatttgtaattttaactagtgtgtgtcaaataataaacgaaaatgaacaactttcacagtgtgattggacacttgagcctcctgttttgtttttgaagtgcctgctcaagtcacttacccatttttctattgcctttcttttctttactaattagtgtaagtcctatatatgtgttgcatatgtaagccttgtcatttatttgtgttaaaatatacattttaccattctgtagcttgcctttgagccctcttaatagtgtagtctaataaacatgtatttttaatttaaatttaattcagtatttcaactgttttattttgtgatgagaatatgaaattctcttaagttcaagaaagaaggcagaaaatagactgctgtttgaccctagattcaagcactaaacaatccaacgcagagcttgtttagccccggtcagtcactaaaaacttcaaagtgacttctcagtcatttaaccctctaagtatgtatctaggtatagtaacagttccttcaaagaagaaaaagaatctgaccactttgaccgaaccaggcttgtgaagtaatataaatctcttacaggccagtaagagaaatactgatcatattaagagacacaaagagctttttgcctgaatgaaaaaagagtgttttaacttctttaaatgattcaattcaaagtactatgtttactccatgtttactcttaggccttgactcatctgagcacactttcgtatccttttctcaggatttgtggggtttacttgagttttcatagaggagtttgatactagcttttattatacttatttttgtatattgtacaatttccatgtttaatgtcttcattggcccaaagtgatgtaacagacattgaattttaatcaagttccagggcttatttgtagtggagctcagatccataaatgggaataaatcataccctttaatttatggaactctgcaatcattggttcttgtacaaactaaattgctttttagatttttttactttattattatttctctttgctcccacaagcacaggtatctatctatggaaggtctctgatttaggatggtttgacctaaagatttttttcttaatgttattttttgatttgctgataggtttatcaggatgtgaccccatggtaagtccagcagcacctgtgtttaaataatgttcttcataatatgagtattttgttttcacattattgagttttgagaatgctttatgtattctgaatatgagttctttatcagatttgcaattattttcatttttttctttatcactatcagcttatttaaaagtttatcttctccctcttttcatctctttgaatcatttttataatttcttcctaaaatatttactttaatgttgttattttgttagaaatatagagtgtgcttattccattttctttatttttatttttaaatttattattaattaatttatttattttactttaagttctgggatacaagtgcagaacgtgcaggtttgttacataggtatacatgtaccatggtggtttgctgcacctatcaacctgtcatctaggttttaagccctgcgtgcattaggtattcgtcctaatgctttccctccccttgcccccccggcccccgacaagccccagtgtgtgatgttccccccccatgtccatgtcttctcattttcaactcccacgtatgagggagaacacgcagagtttggttttcataaaactacatctagagtatatcctctaggtcgatttttactatttgttttgtttttcagatttttaatggtatctgtacataaattcaatttatcttattcagtttatatggattttttttttattggagcttacctgtctagttctgccatttgcttaaaaataaagtggggatggacatctgtgagagttgagttagctaagggattcatttttgtatacaatctcagggaatgtgaaaattatgctgtgacatgtggtgtagatatacacatcaatggaaccggatggagaggtcataaagagacccacagttacatgactaatcaattcaaagatgccaaggtgattcattggaaaatttttttttcatcatgaattgctggaaaaatgttgagcgaacacttcaccaaggagagatagattcaggaagagatggtggaaaaaatgttcagcacggtagttctttgaaaattgcaaattaaaataccaaaataatatttcactacacatttactaaagaagctgattttttttaaagaaagaaacaggcaatacaaagtgtatgcaaggctgtgacaccattggcactctaatgttctgttggaagaatgcaaaatgtattcagcaacaacaaggaaccaactactgatatatgccacaacaggaatgaagtttaaaaacattatgctaaggaatgaagccggactaaaaatgtacatgctaaatgttttcatttatataatattctagaatatgcaaagtatagggacaaagatcagatcatcacttgccaaggactgagagtagaatttgagagactgactacaaaaaggaataaggtaattttgcaaagtgcttgaaatatttcatatcatgattatgttgtttgttatacatcctgtattacatttctgaagcctaatggaagtgtacatctgtgttattgctataaagaactacctgagactgggtaatttataaagaaaataagtttaattggctccatagttctgcaggctgtactgaaggtacagtacagcccttataatggcctcagcttttgtagtgtcatcaggaagcttccaataatggcagaaggcaaaggaagagcaagcatcttacatgatggcagcaggaacaatagagagagcaaccagatcttgtgatagctcactcactatcataagaacagcaccaagaggatgttgtcaaaccattcatgagaaattcacccccatgatccaatcacctcccataaggctccaactccaacattgaggattacaattccacatgatattttggtgagggtcacaggtctaaaccatatgaaaatctaaaaacagatgagtattcattcttctgcaagtgggtattcagttttcccaaaaactattttgtgaagaggctttccttttaaaattatttcttgtaccttggaagaaaatcaatagaccattaatgcatgggtttatttcttgggtttctattttgttccagtggttggtttgcctgttttaatgccaatactgtgctgttttgattattatagctttctgatatattttatttacctattgataggtaaatttataaatatttaccatgtacaacgtaatgatttgaagtacctatacattgtggaatgactaaatctagctatattagcatatatattacttcacatagttatctttttatgctaagaacacttaatatgcactctcagcacttttcaagaatacaacatatttttaatgatagtaaccatgttgtacagtagccctcttgcacttgttcttcctatctaattgaaatcttataccctttgaaaattctccagtgctcctcccaaataccccagccctggtagccgccattctattccctacttctatgagattatattttttagattccacatgttaagtgagataagtgagtgatatgtgtatttggcactttgtttatttcactgaacataacgttctccattatgttctatccctgttgtcataaatgacagaattttcttttttaaaaagggcttaatagaatttaattgtttatgtatttcacattttctttatccattcatccattgatgaacatttagtttgattcatatattggtcattgccaacaatactgcaataaacatgaaagtacaggcatttctttgacatactacttttatttcctttggattttcacccattagaaggattgctagataatgttatagttctattttaatttttttgagggaactttatactgtttttcgtaattgtaatatattttaaaattaggcagtgtgatgcttccagctttgtctctgtttgaattttctttttgtttggctcaaaagtgcttttattagtcaaggtcttttgtgttcccataaaaattttagaatttttttaattctttgaaaatttacattggaattttgatatagattgctttgaatctgtagatcagtttggtaagtatgaacattgaacaatattaattcttctaatttatgaacatgacatatctttccacttatttgcatcttcttcagtttcttttaccagtgtacagatctttcaactcctcagttaaatttattctaaatattttaatttttgtagctattgagaatgggattttaaaacttttttttcagagagttcactgctagtgtatacaaatgccattaatttttgtaggttgattttctaccttgcaactatactaaatttgtttactagttctaacagttttttggtagaggatttgggatttcaatgtataaaatcatgtaatcagcaaaaaaagacatttttacttttttcttatttggaggccttttatttctttttcttgcctagtttctctggctaggatgttgtgcatcatgttaaatagaagttgtgagagtaggcatccttgttttatccatgatcttacaggaaaagtttttgatttttcactattgaatatgaaaaatgaaactggaccattatctcccaccatatacataaaagaactaaaataaatttaaaaacttaaacataaggtctgaaactgttaaactgctagaagtaaacatagcaagaaagcttcacaatatttgtctagacaataattttttttgcatttgaccctaaaagcaccgtaagcaaaagacacacacacacacacacacacacacacacacacacacacacacacaaagtaaagtagaatttcatccaactaaaaagtttctacagagcagaaacagttaacagccaggtgtggtggtctgaaactgtggtcccagctacccaggaggctgaggtgggagggtggtgtgttagtatgtttttatactgatttaaagaactgaccgagcctgggtaatttatagaagaaagagttttaattgactcacagttcagcatggctagggaggcctcaggagacttacaatcatggtggaaggtgaaagggcagcaaagcactatcctggcaaggtggcaggaaggagaagtgcccagtgaagggggaacagcccctgataaaaccatcagatcttgtgagaactcactcactatcacaagaacagcatggaggaaatcactccaaagattcagttacctccactgggtctttccattgacatatggggattatggtgattatggagattatgaagattacaattcaagatgagatttgggtggggacacaaagcctaaccgtatcagaaggcttgagcctaggaggcagaggtggcagtgagctgagatcttgccactgcactccaacctgggtgtcagcatgagaggctgtctcacaaaaaaaaaagaaagaaaaggaaaaaaaaaggaaacaattacagagtgaagagaacctagggatgtgggaaaaaagtatttgtaatgtatacatctgaaaaagattaatcttcactatatatatatatatatatatgtatatatatatatatatatgtatatatgtatatgtatataaacacaaaaaatagccaaaaagaaacaacccagtttacctgttacaaaaaccagttaaggatacaataacaacaaaaagaatattacaggccaatattcctgataaacttaggagcagaaattctcaaaaagatattagcaaatcaatttctcaacaacacatcaaaaagaaagtgtaccatgaccaagtggggtttattccagggacacaagaatggttcaacatatgccaatcaacaaatgtgatacatcacttcaacaaaatgaaggacaaacaccatatgatcgtctcaatagacccagaaaaaaaagcatttgataaaatccaacatctcttcatgataaagcctctcaacaaattaggcatagaaggaacatacatcaacataataaagcccatatgtgacaaacctacagctaatatcaaactgaatgaggaaaatgtgaaagtcttcctgtaagaattggaataagacaaagatgaacacttttaccacccttattcaacagtgtacttgaagtcctagccagagcaatcagacaagataaaacaaacaaagcatcaaaattgaaaaagaggaattcaaattgctcctttttgcaaatgacatgatctcatatatagacaaatctaaagattaagccaaaaaactcttagagctgataaatgtatttaataaagttgcagaatacaaaatcaacctacaaacaaatatcagtagtgtttctatacaccaataaccacctagctaaaaaagagatcaagaatgcaatctcattttaaattgctacaaaaatacttaggaataaatttaaccaaggagataaaaaacctcctcaacaaatactacaaaacactaataaaagcaacgcaagataacacacacaaaatggaaagatatctatgttcatggatcagaattagtattgttagaatagctatactacccaaaataatctacagattgaatacagttcctatcaaaataccagtgacattcacagaaattaaaaaaatcataaaactcttatggaatgacaaaagaccccaaatagccaaagtaatattgagcaaaaagaacaaaactggaggcatcacactcccccacttcaaaatatactacaaaactgtagtatttgaaagagcatggtattgatataaaaacagacacatagacaagcagaacagaatagagaatcaagaaataaatgcatgtatttatagccaaatgattttcgacaaaagcatcaagaatatacactggggaaaggatactctcttcaaaaaacggtactaggaaaattggatatcaacttgcagagaagcctagttaaatccctatctctcaccatttacaaaaataaaatcaaaagggattaaaaactttactgaaaaacctgaggctgtgaaactactagaagaaaaaataggtgtaatgcttcagggcaatggcctaaacaaccatttcatgaataagacttcaaaagcataggcaacaaaagcaaaaatagacaaataagattacatcaagctgaaaagcttctgcatggcaaaggaagcagtaaagagtgaagagacaacctgcagaataagagaaaatatttgcaaactattcatctgacaagagactaatgtgaagaaaatataggaaactcaaacaactctatagcaaaattataatagtaagaataataatatttttcattaaaaagtgggcaaaagatctgagtagacatttctcgagtgaaacatatgaggggcgagtatatgagaaaatactcaccatcactaatcattaggtaaatgaaaattaaaattacaattagctgttatcccagttagaatagctattatcaaaagcacaaaaaataatacatgctggtgagagcacaactaaaaaaaaaacaaacaaacttgtgtatgctgttggtagaaatgtaaattttaatgccattatggaaaacaatatacaagtttctcagaaaagtaaaaataaaactgcatacatttcagaaatctcattactgtttatccaaaaaatgaaaaattattataccaaagtgatacctgcacccatatgtttattgtagcactattcacaattgccagaatatggaatcaacctaagtggtcaacaagtgaatgtacacagaaaatgtgggatatatatatagtagaataatatttagccataaaaaagaatggaattctgtcatttgtagcaacatggatgaaactggacttcattatgataagtgaaatgagccagtcacagaaagacaaatattgaattttctagctcagatgtggaaactaaaaaagttgatctcacgggggtagaatctcataaaaagtagaataatacttaccaggggctggggaaagtggtgatgggggaagataaaaagaagttaatttctgggtataaacatgtaattagcactagtgtttgagggacattattttattattttttatagctatgtagcattccatggtgtatatgtaccacattttctttatttaatccaccattaatgggcacctaggttgatttcatggtttaatattgtgaatagcttgacgatgagcatgtgagtacatgtgtctttttggtataatgatctattttcccttgggtatatacccagtaatgggatttctgggtcaaatggtagttctgttttaagtttttacagaaatctccaaactgctttccatggtggctgaactaagagagagtgccgagcaaagaggaaaaagccacttataaaaccatcagatctcgtaataactcactcactgttatgagaacagaatgggagtaacacccccatgattcaattacttcccaccaggtccctcccatgacacatggggattatgggaaatacaatttaagatactgattattttaatccatgagcctggactgttttatcatttatttttgtcttctctgatttagttcagcagtgttttgtagttctccttgtagagctccttcacctccatggtcagctgtattcctagatatttcatttttctgtggcaattgtaaatgggattgtgttcgtgatctgactctcagtctagacatttattgatgtagagaaatgtcactgatttttgtccatcagttttgtattctgaaactttactaagattatctgtcatttctagtagccttttggcagaatcttttagggttttctaagtatagaatcatactgtcagtgaaaagacatagtttgactttttcttttcttattcggatgtcgtttgtttctttctcttgcctgattgctctggataggactttctaaatagatacttcttagaagaaaacaaatggccaagtatctgaaaaaatgttcagcattccttatcatcagggatatgcaaactaaactacaatgaaatatcacctcatacctcttagaatgactataagagaatccttgtacactgttgatgagagtaaattaatacctcttagaatgactattgtcaaaaaattttaatgacaagtagttggataggttgtggaaaaaagagaatccttgtacactgttgatgagcataaattaatgaggcctatatagaaaaaagctgaaaatagaattaacatatgatccaggccgggagcggtggctcatgcctataatcccagcactttggaaggccgaggcagtcagatcacaaggtcaggagatcgagatcatcctggccaacatggtgaaacccagtctctacaaaaaatacaaaaattagccaggcgtggtagtgggcgcctgtagtcctagctacttgggaggctgaggcacgagaatcgcttgaacccagtaggcggaggttgcagtgagctgagatcgcgccactgcactccagcctccagcctggcaacagagtgggactccgtctcaaacaaacaaacaaaaaacaaaaacaaaacaagacaaaacaaaacaaaaacacatgatccagcaatcccatttctgggtatatattcaagataatttaaatcattttgtcaaagagatacatgccctctcatgttcatggcagcagtattcacaataaccagatacagaatcaacctaagtgcccatcagtacattaatagataaagaaaatttggtatgtatacacaatggaatactatttagcatttttgaaaaaggaaatcctagcattgataacaacattaataaacccagaagacattatgttaagtagaataagccagtcacagaaagacaaacattgcatgatctcacttatatgtggaagctaaaatagatgatctcatagagggagagagtagcacgatggttattagaggctggtaagaggaagggtcatggtggagaggaatggggagatgttggtcaaagggtgcaaagtttcagttagataaggaagaataagtttttgagatctatcgcacagcaggatgagtatagttaataattttatattgtatattttgtaatttcttagaatgtaaatttcaaatgttctcattgaaaacaggtaatattctaaccaaaaaatatgatgtgatgtgatgagtatgttaattagcttgacttcatcattctgcaacatatacatatatcaaaaattacagcatagctcataaatatattcaatggttatttcccaatttaaaaagaagatgagttttactgatataaattacacctcagtaagcctgaattaataaaaaatatgttgggataactcttgtagggacatttccctcctcacttattgatgtatcttactttatatgttcaaattatatttttgttaacctctttattgatcaatattcctactaaaaggcaagttcctcacacacattccttgtccattaagatgtttctggtgtgtagatgaatggctgacacttagaaagtgctcttttgtcaagttttatcctgaggaatagtttagagttaaattttctatgtttaattgattattatcaacaactacaaaaatggtagcatttttttgctttcaattttgctttcacttcaggactaaaagaaaaaaaataaatgaaaaaataataaataaaatgaatgagttttccaggtggtgcctctttcagcttcctctcttctgtcatactgtgttgtaaaactgagcctctaatagaacatacctttctccttccctgaccaaatatattctaaatatgtattgttgcaataaaagatgagttcagggcccttatgtggactctctcttttaaagaaatctgcagtcttttagagatttgtgtcgtcaagaatcatttctatccattgaacaatatggttaataacatctactcttcaggcttgcagtaagattaaatgagatggatatataatgtaccaggtccaatgattagcaggaagtattattcagtaagtgtattacttcaataaatattcaatatatatcctcttcttccaagctctctctttggacataacaaaataatacccttaaatattagaaaagaaaatttagtcctttctgtctcaatttcttaaaaattagaaaaagatttttattttctttctggtgacttcactgaacacaaagatcaatgttatctctacagccaatgaaatccaggaataattttctgcaatgattaattgatatttttaagtctttcattcttattaatgttttctgtacatatattttacctcaagacagcacccaccattcatgctctaaactcctcaaggacaaaagccctgtattatgtgtgtttggatctcaaccttgatgctgtatatgttttaggttttcgaaaaacatgttgaattgttgactaaactgttggaaagcattcagttatacactcagaaattgattatcaaaggagaagaagtattttaaaagaaatttgcttcaaattttggcagtattaattcatatttaagaccattgagtaaggatattcaagaagtttttcctttaatcgtcataaggtgtaagtccccttgacattataaacaattattcatgcaatgaagacaggtcgacctgttttggaaagggcagccagctcatttttctttcttgcctagtctagttctattttggactcaggaaatgaggaattactttacaaagaatgggacattctctaaattcctctgagctctatattgaacatccaaaccaaaaataaaagaaaaaaatatataattaaataaatagcaatacatttattatctttctttcactcttctcaaatctacctccaaaataaaaaaagaagttatcccatcactaattattttagaaggcagtgcctgaactctataattaaacttcattttccaaattatatatatatatatttaaaattttagctgtacatttctgatcataaatttgttttctctacatcactttaataagtttccttgtgctgtgaatagtctgttttgcccatgtacatggtgcttgcagactttagttaatgattaaaagagataggcagataatgtaacttagccaagggcttgacgagagcattattcagtaaatatctgtccttactcctctaatctgttctcctgctctgctctcctggaggtcctaccacaaattcatatacaatcagtgctcatatgattttatattctatgtttatatatatccacttgaaggaccggatacagtaaagggagtagatgaaacacacgtgacaataaaaccctgacccacaatgtctgcacttaccaatccagaaagccaaactacattcgcagcagtcgagaatagtaaggacttgtcagcttccctgtttgcaattaagactaaatagagacagccaaatatactcttcaaaccaatcacacagaatgtcccactttttgttagcctgacttcagcttccccatgctaacaacttctaatcggagcatacctgaagccttctttctcttttccactgtaaatcttgtgcactttgctgtctttgagtatctgcctaacagtgctgatagttgacttctttaccatagcaagctgtgaataaataatctgtttattttcattttgatgatcttcatttattttcataccctcttcggttaaacttatcgtattttaactttgaatatttcggtaatcatcttaatattttcatctccccttttttactgttataacattcttgaagcaaacttccacattgttatcaaattgatatttctagtatttaatcaaattatgtcagtttctactaaaatgttttcaaatacttcttatttcctgaaaggaaaatccaaaatgtttcatgtgaccatagggatctatgatttggtattttagcctccttttttttttccatttctttttattccttgaaattcaacaacactgaaatactcataattccatgtttatgccaagacaagccaggacctccatttacttttcacttgctcaaccatttgctttaaatgatttatcttgatttcacactaactacactaatccattctctcactcttagttcagttgttattacctatgataaacttgcttattttcccccaaggaaatctagaccctgtgtagagtttagagagcttcacaataacaaacgacatctaatattggagaggtggattaaatacttgcatcttccctaaatttcaaaataattaaaggaaagttcactttgaaacatatttgtatattcccagggtatgccacttgagaagtgctttacaaatatcagtggaaataatgcaagcataaaggaatgctcaaaaacttgtctgatagtcccaactgctctttcttttgattcgttccaaacaagtttaggtttctttcttacgtggtgaatggtactaaaaattgttcctttttaagcatacaaaaattaaaggaaaaacaaagacccacataatctaaattgctacacaatttgatcataactacattttctaaatcctgacaggttatctttaaatataataaaaggagccagagaaagcgaatcacgtttctatacattttaacatataacttcccaaaagaatgtaaggaattttttttctacaattaacctgactactcttttgggaagtttctaaaactgttatacatatttcaaaataattttcagaggaaatgccttgtacctcattacaatgtatttaaaagtggttagcatgttatgacaaaatactccaaaactgtttgaacacaagtgtcattaaaatttgcaaatggattgttgagcctttagagatacagatgaaccatctcttcaaattttgagaaggttttgatccattaataaaaaggcgaaataagcaaataatcaaaaagctatgtacatatgtttgcatttcaaaacacatattggcttttcactcaaacaaaataacatagaaaagaagttgggctggatataaggctgacatgctgaattataaatacctgtaaaatatccaggacagtccatctggaagacagaggaaaacttcagtttgaaacttgagaaaaatgttttaaataaaaatatagagggtttgttcagttatagagggatatttgaaactttggatgtagttcacctaaaggtagtgtatagaggagaacttctatgggccagcttctgcagcaccaacatttgaggttagacatagccagataaagcctgtaaaagaaaaaacaaaggtagaaaataagggctcatatttcatctactaagggccactgcacaaagcctgacatacaatatccttaatacatcaccataatgtacactaaatacataatgtgtacaatttagcgttactcaaaataactttgaatatcaaatgtttgaatatcaaaactttgaataagaatgaagatcaaagaataccttcattcaacaatggatttttgtttcttcttcattttcctatttgttcactcaaagaaacatttattgagtggtgaacaagtcagaaaatatctttgccttgtgaaacttaaagtggattatggacattacacatggaaaaaagggcatgagtgaattttatataattatagatgctatgagggcaaaataactttaaaactaaatagagagtagaatgctagtggttgtgggagagggagtagcaagagttggattccttgctttaggtaaggaggtcagagcatcctttctgggaaactgatgttatgacaaagatctgtgtgacacagaatcaagtttgtgcatatttagagtaaacattccaagcaaaagtaataattagtgtaaaactctgttgaaggatgaacttgacaatttcgagactagaaagggatgatatggctgaagcctaacgaaggagaagagtaataagttaatctgaggtcagagaggtagcaaaaagtcaaattgtacaggacattatgaaccatggaacatacttgaattttattttaatttaagtagaacacttctggggagagtttaagcacagaaggagaaatttttgaaagacttttgtttttataaattattttttaaaaataaaactggctgcagctatactgagagtggacaatagaggaagatgagtgcctctctgaaactcttctttcaggagatgtgttgtccggggtggggatgataacagtagaaattgtagtggacagttatatttctaatatatgttacatatttgactaagtgttggagaaacaaaagtgagatggatagccgtatacttgaaatgtgtgtaggccatctaaaaagaaaaataaataatgtggtgactgctataattaaaaaaagataatgaaatattctaaaacactcatgtttggaagctagatggataagagttcaaatacgagttctgcaatttattagatgtgatatctcacgtgaaatatgttttgtttatttgagattgtgttttatttataaatacatacaagattaaatatgtcttaagattttacctcgtctcaactcagcatacagataacataatcccaattaaaatcacaacaatctatttcatagatattaacaaactgattctaaagtgtatgtagaaaagaagaccttgaacacataatacaatgctgaagaggaagaacaaagttagaatgtttatactacctaatttctataactctgtagtaaaatctatagaaattcagacagtgtggtactggtaaagaatagatacgtagattaatggagcaaaatagcaaatccagaaatagacacacaaatttgtcaagttacaaaggaacaaaggcaagtcaatagagaatgtagagtcattttaacaaacggttctgaaatgattgaactttcatatacaagatagaatagaaagatatgcacacacatgcgcgcacacacacacacacacacacacccctacacagaccttatacctttcacctaaattaagtcaaaaggagcataaacctaagtgtagaacatgcaactataaaaattctagaagaaaacatggaagaaatgatgtgactttggaactgatgatgagttttaatatgtaaaactaaaaccattaaccaaaaacaaaaaagataagttgcaatttttttaattgaaaacttctcatctgtaaaatatactattacaaaaatgaatagtcaagaaacataatggaggaatatattttaaaggcaaatatttaataaatgtatctgtccaaaatatgcaaagaacaattaaattgaacaagaagaaaaacaataggcaaaataatatgcacagacattttatcaataaagatgagctaatgacaataatcatatgaaaagaggatcaaaattatctgtgactagggaatctcaaattgaaacaataagataacactacacacttatgagaaatgctaacaaggactttcatgcattgctaaaggaaatgcaaaatgctacttccactttggaagagagaccatcagtttctaataaaattaaatgtagtcttgtcatgtgatcctgcaattaccctactatttatccagcttattaaaatacgtatgtccagaccaaaaatttatatgaatggtatttattcataattgatgaaaacaggaagtaaccaagatgagacattcttcaatatgtgaatagataaactggggagcatccatacaatagttatttagcaataagaaataaaaaatattaagccatgaaaatacgtggaagaattttaaatgcatgctgctaagtggaataagccagtctgtgaatgctatatactgtatgagtccaactacatgccattctgaaaaaggaaaacaacagtgacagtatattagtttactgtggctgctctagcaaattaccacaaatttggcagcttaaaacaacagaaataaattttttcatagttgcaaaggccagtagtctgaaatcaaggtgtcaggagggctacactccctccagaggcactgggagtcaatccattctttacatcttccaatatctggtagatccaaacattctttggctggtgaccacatcacttccatgtctgcctcaagaataatattgcttccttttcttctctgagtgtcttctatctgtttgtttctcataagaacatttgtcattggatttagtgctcacctgtgtcatttagggtagtctcctaatcttgagaccctttaattatatctgcaaagatccattttacaaatatggtagtattcacaggttatagggttaagacaaggacataaattttagggaccatgattgagccactacaaatgataaatagtgattgtcagcagatcagggagaaatgaaaggttgaaaaactaaaggaccagtggtttttctttagggttgtaaaactataatactggaatggtgtacataaaacactatgtatatatcaaaaatttataaaactttatggcacagatattgaactttaatatacaaaattttaaaaaccatgttggaggatggagaaaccaaagatggagtgaagagtatgacaaatcaattaaattgcatacaaaatcagtgaacaaccgaggtgagaaaactaattctgacctaaggaacttttgaaatggggaaagtctgcaaaactaaagcgacatgaagctttacataagcactgtactttagttgataaagttgtttcacacagattacaggttaacagttctgaccactatacacgtatactggagttaaacaattatgtaagtggattgctaattgtgagagccaggcttctcactgttggagtaggatgttacaaatgagcaaggggaggaagctaaattgatccatataatagtatattagaattggagattttaatttgaacttatgtctgcttcatataggtacagatggttacacatggaaatatgtatagatacctttctgtacactagttagtacacacacatatatttccttgctgcatcagctgagaggacacaaaaatcatgacaccctggtaggaatgagaacactacgactcagatttaggtttctaaatctattctataaaaaataaaccagagctcattggagaaatggcctattcaatgactggggcaggaaatagacgagataaacctggaaaatcttgtactgccagaaagcaagaacgtcctaaaaacagacaaacaacaacaaaaccaaccacaaagccctataagtatgggaagatgtcaaaatagctagcacagaagtcaactaaaagagctcctaataatcaaatctgagaaaatgtaaacaatacaattttgtattggattataacacaaaatacaaaataagcatcctaacattaacactgacataaataaatatttaacatataagtatatatgggagaatagacaagtatcccataaaacacgaatttcaagtttatgtagataccccaccagtgacaaggtggaacataagcatccgccgttagcatgggtaacagatagtgacttccttgcaaagagtacagtatgaggataagagtgactttatggtggagaaatctgacaaattgtcacccaggtgatcaaggttaacattgacagggataagtcatgttgatagcatgtattcttgatatgatgtgactcaaatggcactttatttctgtgatcttactcccagcaacacatactcccagtctagtcatgacagaaacttcagataaatgttaactgagaaacattttgcacaatacctgcaaagtactcttctaaaagtgtcaaggttatcaaagtcaaagaaatgctgagaaactgtcacaaccaaaagaagcctagggagacatgatacttacgttcaaagtgatgtcctggatggattatggctgaaaaagtacattaagaaaatgtgtaggaaatctaaatttaatgtggatcttatttgatgataatgtatcaatatattctcacgctgaataagtgaatcatcctcaagaattaaatactgttcaatatttcacaaagagtcaagtctcccactattgccaatattgtcctttttgattgtaaccattgtgttttgaaatccaacatatttctaacaaaagcctttgtaaaggctttcacattctcctcctccaaaaatttcgtcttttctttctctgcattcttaggacactctgcttttaagaacacatggtacttgagatgtgcaatttttctgtctgtgagagtgtgagcttttgaacactgagcttcttagagttagaataacacagaggttagaatatgaacattcaatcaagtggacgtgggatgccatcatagttattccattttccatggatattatttaaaccctttgtgcttcaggttccccactctaaaaatagtacctaattataagaatattttgataaacaattgaactaatatgtaaacaattaggaaagtcctgttatatggagtgaactatatagggattcgtcattattatcgttactattatttagagtatattattattgtcattgttccattatttacagtaatacatattatatattatagtaagcaagggtttattgggcatctattatttttcttctcaagtttaataaacactgtggaattaaatgcagccagtttattgatattcatgaatctgtgatgtgaatttacaaaataagtttaaagaattgtaaactccaaatctcatccatatagtaggtttttccgcccaccccactaaagctgaaggaatccaataaatattttctcacagagcatgagtaataggagaatgacaaaggctgttaaataaactggataggtttctattatgttaagaaacaatattgttgggagtttgacaagatgactttcacacaaagaaaaaacagttgcccctttagtaagacaaaatgttaattagcccagagaccccctcgacttgaatgtatgagatatgggtatggtattttatacttcatatgcatgataagttattttggaatatataaaacaaggggctggggcagtggctcattcctgtgttcccaacactttgggaggccaagtgaggaggattgcttgagcccaggaattcaacaccagcctgagaaacataacaataactcatctccaccaaaacaaacaaacaaacaaacaaaaattagcccagtgtgatggtgtgagcctgtggtcccagatactctgggacactgagtgggaggattctttgagcccgggagattgaagctacgttgagcaaggatcatggcactgcactccagccttggggacagagtgagatcctgtctcaaaaatgaataaataaaagaaggaatgaataaataaagaaatatattcatacatgcacacaagttttaaaaaataaaacatttaatatctgttctctgggtgtaagaaattcataaacacaagaatgagaagtatatagaggtttctgtttttatactaatatagcagggaaattatcacaacttaaacataataaaatccgtttgcatttcctaaaattcctacatcagccttgacttcaaacactcttattcccagggcaatattaaaatgccatcttactgaaggttcacaatttatttaagaatttcttaaccttcaaattcactagcatttttgatatatatatggatagatagatatagatatatcccaaaatatcttttccgacatatcacttttacctcttatcaaggtatgaaagaatgttgcagaccaacaagcaatcatatatccccaaacatgttttgctctttttgactgctatcatttcctaggcactgaaaaaaatcacacatagcagttaactttaagatcttcagaaacacaagcatcaggttcctcccaagctgcctgtctatttgaaaacagtgtattcaaccaagagtaatttttttgtgtgcggctgactttaactgctgttccttttttccatcagaattttctactcttgaagatatatgttgtagtctgaagaccatcaccacgttggttgctgtcatgtgtagcgtggaactcaggagaaaccacttaaagatttacaaagcattttagaacattttaccctcttgttagatttgcatgtattcacattgtgattatcccaaatgtaattagccttttctgtttgccaattatctgggaagatttgccaaatgcatcctgacggtattctgacagaaacttgcagcagttacaaattatcaacaataagttcagttacgccatagtgtaattctatgctacatgaagaatgaatgctatttattcatgtgatggcagaaacactctaaggaatttctgtcaaagagagttgggtcattatttgttggaatgaaaaagccattaggcagcacaatatataaatctcaactaagaaaaaatgcttttttggtctcatctccataactttctacagcttaatgcaaagcaaaggagataatcagctcttaagaatccatatcaatagtaaaaaaccagtcatcctgatattttgcaaaaaggtatatatttttctttaaaaagtgatgtgcgtgcggatatataatttttaaatgaagtaattaagtaacatggtaaactcatggcaattttctttccttcctattagaaactgaaaaggcttgccaggcatggtggctcacacctgtaatcccagcactttaagaagccaaggagggaggatcacttgagccaggagtttgagaccagcctgggcaacaggacgaaaccttgtctctactaaaaatacaaaaattagccaggcgtggtggtgcatgcctgtggtcccagttacacaggaggctgaagcaggagaatgacttgagtccaaaaggcaaaggttgccctgagatgaaatcatagcattgcactccagtcagggaagtaaaaccctgtatcaagaaaagaaaaaagaaaaaaagaaaagctgataaaaactcagcttacagatgagcaaatctttctaagtctgctggttatcttttaaaaatttatttgagtagaaaaataattgtctatgtttaaactgtattgtgtttgtgtggttttcttaagataattgaaagtaagacactgtattttatcttaaaaagccataggtttaaacagattggatgacaggaaaatttggcaccaataaaaatagacatggtaaaagaatgaactgtgaatgaccagtaaacttataaaagtgttcatactcaccagtaatcaagaaaatgcaaattaatttaacaataaaatgacctttttacctctgagaaaaaaacaagatgaaaataaatgactgtacagtagattagtattacctacctatagatttatctgtctaactatctgtcttagcacaggatttgagacaacttagaggaaataaaactacctaacaataacacacatatgcacacacacacacacacacacacaaaccaggtaaaatataaaaatagaataaatatcatcacccaaatggaaagctagtttttaaatagaattattccatatgtatgcaaatacaatttgcctttagcgtcactttttattctaaaaagaactgttgcttgagtgataatttacatgatttttttaaagcaggcattagctgagtttaatgtggaagagatactgaaattctaagaaaatgagaagtattaaaagtttccaagagcataattatataggcagtctattaatttgagtgcaccaagtcaaaggattgatcctttggtaaggcctctatgctttatgtggaactgtcaaaatcaataacccaggagcataaccaaactagaaagagcacagccttcatgaatactatagtacgtgttcaaatcaattctttgattaaggtaatcaggatggctagcgcctctactcatctatgagaagttaacagaaatatttaatggggtaattccaaaacttatttaattttaacattttttcctattaacacataacagtaaaaaatttaagcatataacgagacattatttgtaatgaaaatccaaaaatagtgacattaaaaggaacgcacattgaacccacgtgcaaaattatcagagacttcaaataattcagattaatactctcaatttaaaaaaaaatattagagaacagaaagctctataagcaaatagaaattctagaactgaaaaatataatacttaaaattaagttgttaaaggatagacttaccaacaaatgagctacagtttaagagaattaggaaagcagaaaacatatgaaataaaattatgtaaaaaacatgaaataaaaaaatgtaattaagcattacatgttagttttctactactgttataataataaagtatcacagattgggtggcttaaacaacagatattttcttttcttttcttttcttttttttttttttttgagacggagttttgctcttgttgcccaggctggagtgcaatggtgtgatcttggctcaatgcaacctccgcctgcagggttcgagcgattctcctgcctcagcctcccaagtagctgggattacaggcgcccaccaccatgcccagctaattttttgtgtttttagtagagatgggggtttcaacatgttggccaggctggtcttgaactcttgacctcaggtgatccacttgcctcagcctccacaagtgctgggattactggcgtgagccaccgcacctgaccctacaacagatattttcttatggtcctgggggctagaaatccaatccaaggtattagcagggttaatttcttctgagacttttttccttgccttttttgcatgaacatcttcaaatggcttttcctctatgctcacctgtgtccagatttcctcctcttctaaggatatagttcatatttggttagggcctaccctaatgaacacccatgtaaacacaaacacctatgtaatgaccagatctccaaatatagtcacattttgaagtattggaggttggggcttaaacatgtaaatctgtgggagacacaattcatcccgtaacatttgtaaaaaaagaggatggaagataaaaacagaaaataaacatgaaaaagatatagtccttataataccagaaggagaggcgagatataagagagaatatgaaatatttcaagatgaaaataagagaattttctcaaagtagtttaaaagaaatcaagccacaaaatcaagaagcactgtaatactcatgtaaaaaatatttttaaaagacataagtaaaattgtcatgataaaaatcttaaaatcagacttataatgtcacattatctttaaagttgtaagtatgagactaaaaggtgtgagacaccaaaatcatttggattatatcttcaagttgttgttgggatggggggtggcagaaggaaggtcaggttgaaattccataccaagtaaaaaatgttattaaatggttgaggttaaacattatcaggcaaataaaacttactcagacacaaaagacctgcattaaaagatatactaataagttttcctaacagagaaataaatgaacccatatggaagtttggaggtagaaggtaaagaccaacaaaagtacatataaacatgataaatctaaaaatattgattgcaaaaaacaatgtaacaattatactggaatttgtgtaacagaaggtaatagcatgagttggtagagagtgaaaaatattattataatgttatagagtcattcttttgttgggaagaggtaaacatttggacttgcatacactctgatggatcaaagactaatgatgcaatctccaggaaagatgctaaaataaaaagtaaaataatgtataattatcaagataataaagagacagtatgagataaatagcaagtagttgaatagtatatttaaatttaaatgtataactatccacattacatgtaaatagccaattttttccaattgaaagacaaaattttagatttttttaaaaaaaatactgcattctgcttaaaagagtcaaatctacattaaataaatacaaagaagattaatgcataaagaaaaatatattctaagcaaaattaaacaacaaaatcatggtgctactgcaatacagaaaaattagaactaaaaaaaactgtatgagaaaaggccattaaatgctaaaaagtaaataccagagagatataaaatgtaagatttttgtacattaaaaaacctaccctaaaatatgtaaaacatatagtgtcagaaatggccaggcaaggtggctcacgcctgtaattctagcactcaggtggctttgacctgaggtcaggagttggagaccaacctggccaacatggtgaaatccaacagggtaaaaatacaaaacttagccgggcgtggtggcatgtgcctgtaatcccaactactctggaggctaaggcaggagaattgcttgaacctgggaggcgaaggttgtagtgagctgagatggcaccactacacttcagcctgggctatagagagaaactctgtctcaaaaaaaaaaaggaaagaaagaaaggagaaatgcatatacctacaattattttgggtgtatgtttatgcacctatctcaggctgtggtacacagtatagacaatattgtattatgtattactaacaaaatattttatcaaccaaattaataattgcctggttgatttttatgaaagattgaagtatgtgtataatttataagttctcaggaacatttccatattgatagtatctgcattatacacttttgagaatgtggtttttgaccactgtggaattggcaaggaaagaatgacagaaagctagaaaatatccatgtgtttgaaaattaacacacatatttatagctcaagtcaagaaagacaacatactaaaattacaaaccatttaaagtatattttaattaaaatgtgaaattaacaaaaatacagggtgaagtcaaaggatttgaaaaatatgcttttataaaggccaatatgaagaaaatatattcgaaatgtatgtgacaagtattcaccttaagaaaataaaacaaagctggaggcatcacgctacctgacttcaaactatactacaaggctacagtaaccaaaacagcatggtactggtaccaaaacagagatatagatcaatggaacagaacagagccctcagaaataatgctgcatatctacaactatctgatctttgacaaacctgagaaaaacaagcaatggggaaaggattccctatttaataaatggtgctgggaaaacaggctagccatatgtagaaagctgaaactggatcccttccttacaccttatacaaaaattaattcaagatggatcaaagatttaaatgttagacctaaaaccataaaaaccctagaagaaaacctaggcattaccattcaggacataggcatgggcaaggacttcatgtctaaaacaccaaaagcaatggcaacagaagccaaaattgacaaatgggatctaattaaactaaagagcttctgcacagcaaaagaaactaccatcagagtgaacaggcaacctacaaaatgggagaaaattttcacaacctactcatctgacaaagggctaaaatccagaatctacaatgaactcaaacaaatttacaagaaaaaaacaaccccatcaaaaagtgggcaaaggatatgaacagacacttctcaaaagcagacatttatgcagccaaaagacacatgaaaaaatgctcatcatcactggccatcagagaaatgcaaatcaaaaccacaatgagataccatctcacaccagttagaatggcgatcattaaaaagtcaggaaacaacaggtgctggagaggatgtggagaaataggaacacttttacattgttggtggcactgtaaactagttcaaccattgtggaagtcagtgtggcgattcctcagggatctagaactagaaataccatttgacccagccatcccattactgggtatatacccaaaggactatacatcgtgctgctataaagacacatgcacatgtatgtttattgcggcactattcacaatagcaaagacttggaaccaacccaaatgtccaacaatgatagactggattaagaaaatgtggcacatatacaccatggaatactatgcagccataaaaaatgatgagttcatgtcctttgtagggacatggatgaaattggaaatcatcattctcagtaaactatcgcaaggacaaaaaaccaaacaccacatgttctcactcataggtgggaattgaacaatgagaacacatggacacaggaaggggaacatcacactctggggactgttgtggggtggggggagtggggagggatagcattaggagatatacctaatgctaaatgatgagttaatgggtgcagcacaccagcatggcacatgtatacatatgtaactaacctgcacattgtgcacatgtaccctaaaacttaaagtataataataataaaagaaaatattatcaaaatagaagaaaattaaaaatataagaaaataaataatatttatgtataagaaactaatgaaatagaaaacaaataaaaaatttacacagcataaattgaaccaagagttgtttctttcaattcaggatagtaattaactttggggaagaaagaagttgtaaggggcagaggtaaaaaaaaaagcatattctgttgtgctaataacattctatttcttttgtttttcttttcttttttttctttttttttttttttggtttttgagacgaagtcttactctgtcgcccaggctggagtgcagtggcgcgatcccggctcactgcaagctccgcctcccagattcacgccattctcctgcctcagcctcccgagtagctgggactacaggctcccaccaccacgcccggctaattttttttattttgtttagtagaaacgggatttcaccgtgttagccaggatggtctcgatctcctgacctcgtgatccacctgtctcagcctcccaaagtgctgggattacaggcatgagccaccgcgcccggccaacattctatttcttgactagcaggcctgttatgaatatttcctcggtaaaaattaacttgctataaaattacaatctgggtacctttgggtatgtgtgttgtacttcaatacagctttgaaaattacaaagaaataaatgtagtaattttgagtataaagttttcatttctatattgttgccatggcaaattatttaaaatgagttacgctggtcttctttgaccaagccattcttgactataagttaatgagcaaatggtagttgggtacgtatgatatttgaagaatcattgcaagagaaaaaaacagagtgatagtgaaaaagtagtctttgtccttaaatatctcaatagacaatactattactacaagccatattgaaataattattttaaataaaataatcaaaatgctctgataataaaaaataaggaacaataaattacaaattaaagtttttatgaatgtgttagaatttaaactacctactgatgtatgatcaatatctgccaaaataaagaagaaatggtagaaaagcacttcaggttaaggcataagggtcacactgtagtggaaaagtcagagaatggtaaataaactggtacagctaaaaacatgtatatatacatatgtatatatccaagttccctgatgacatgagaaatgagattatggaagatggtagtaaatgatagtttgcttcatgtcatcagggaacttggacaagagaggagatagaatattattggcaattcaaagcaaataatactaaccaggaggagggagtaatgtgtgtgtgcatgtgtggatgtgtttttcaaaattaactatggatgaattacattggatatccagcagaagtctacagatagagcttggccagtactcttctccctagattctatataatggttacatttctagtcaagattaaaaaagaaatagaaataccctctcattaacttggaggcaaagaaattcaatggaagtgtgtcaaggagccgtgctttccaggaaccaagcacaagatccacagcagtggccatctactgagaacactgccatttggcttcttccactacattccctacagtatttctgaatgtcatagccctgaacacatgctactattttgaggggttcttcaatttgtaggattcttgcattatttaagtttctgagaggaagcatcaagtcggttatgtctggttatttgcaaaagctatagattccagagggtgtgtaaaagaaataaatatgggaaacagaatattaactttagcttgagttgcctcctggcataagaataaacaaatatcctttttgttgtttgacatctatacaaattatttttatacattgcatccccacctccctccccccgcacacaaatattcccattttatataatgcagctactcctgttacaactaaaaatgaatttacactcttcccaagtagacaaaatttttacaagtaactgtacacagtccaggttcagaatttctatataatgtaaattcctcttcaaattctatcactgttattttctgaaaattatagaacaactgtgtggttaattataaaactaaccactaaaacatataaaatactgaaggtgagggagtgaatacaaggaatttattaaaatatataaagagatacatgacactttatatcaacttcattatttagaggcttttctgaattgggtatcctcagagacacacacacaggcaagtcattagtgggacccagagtcatggcagaatcttactcagcccttctttccgtcctgtcaaggagtgacactgaaatatacagttaagagctccccagtgttcttcaggactacctgtaggggggttgcaataccacccctgcataaatcagctgttgccatcatagcatatggagtcatataaaccaaactagaattaaatttttattcgtcagttaaaatgccctaaagaaatccacatgaggctatcagtatggattaagggagggcaagagtacagcagaaattggcacactaggaatgtgaataacctggtaatgtgactttcttgtactttaaagaaatacctgggttcagtcttttatatagcccacatccctctgatgatgaagtgctactatgagatctggatctaatagctgagtggattcgtttacatccagtacaggatgaactactagaagcaacaacaacaacaacaacaacaacgacaaaccaagcagtcacttgatgccccatggacatatgctgaacctccagaatggtccctagtgagccaagaactgttgtcaaaggataatcacagttacttctggaagagtgcactacatagcttcagatccttggggacctcacttgggctctctctgatattagcttaccatcagtgagcatagatacattgagccacattgactctaagattgtaagtgcaaagtagaagaggtgcagcctggaaaatctgcccttctggcatggaacaccatggaaagctggttgctttgaggatctcaggtaatacgttggagcactctgctaaaaggtgatatatgttccctccaaacctatcagcaagctcttttcttagcagttgggaatacaatgttacagcatcttgccttgtcctctcagatggaaaagactggcaagttccagattcttggcccatcaaaaaagttcattgatgtagcagactcctgtatctttgtgtgatttattctcaatctctgaatacagttatacactccatgatgatatttcagtcaacatagactctatgtaccatggtggtcccaaaagattttaaaggaactgaaaaattcttatcatctactggagtcatagccttcataacgttgtagtggaatgtgttactcatgtgtccttggtgatgctggtgtaaacaagcctactgtgcttccagtcgtataaaagtatagcacatacaattatgaaccgtgaataatacttgataattgtaataaataatttttcatgcatttactgtattatacatttttattttataattttaaagtgcacttctatgtatctatgcatgtatctatctataaaattaactgtaaaaatagcctcaggcaggtctttcaggagatattttagaagaaggcatttttataatggaatatggcagctccacagatgttactgcccctgaagaactttcaatgcgatgtggaggtggtagatagtgatacagattatcctaaccctgtgtaggcctaggttaatatatgtgtttgtgcattagtttttccaaaaaaaaaaacatgaaaagtttaaaaaaatagaaaaaatcttacagaataagtattaaaaattatttatgtacagcatacaatgtgtttgtgttttaagttgtgctattacaaaagaattaaaaagttaaaagagttaaaatatttaaatttataaggaaaaaatatagtaggttaaggtgaatttattattgaagatgtttttgtaaatttagtgtaccctaagtgtacagtgtttataaaatctatagtagtgtacaccaatgttctagaccttctcattcacccatcacttactccctcacccagaacaactaactcccagtcttgcaagctccattcatgtaagcactcagtataggtataacatttttaacattttataccacgactttactgtaccttttctatgtttagatacactcatatttaccatcgtgttccaattaatattcagtagatgatttacagtttgtagcctagaagcaatagggcatatcatataacccagaagtgtagtaagatatgccatcaggtttgtgtaagtacactctatgatgtttgtacaacagcaaaatcacctaatacatttcacaaaatgtatccattagacttcacatccagtgttgggaaccaaatttaaacataaggtttggaggacaaacatctaaactatagcaattggttaaaggctagtggtagccctgtgaagagggtgaataaccctgaaacaaatgataacattttatttctgggcttgtagggtaaaaacaatcctcttgtgctattttatcttactgaaatggagaaaaagtatttgtcaggtcaatagctgcttgccaactgaattgatttgttcctacaatagaccatatctggaagaacagctgcaatggaatgatgatatgattaaacttacaatattccattgtgtttctccaagacacatgtaacttttgtatcatgcaatatagagtctgatataaaaatggaataaggatcaccattcctaatctttaacgtttttatgttgacgctaatagctgtgatttacaaaggacgttattttaaaaattattgcccttttctcctatagtagacttaacttggtgcatcagtgagttattatatcaattctgccaggtatttttaaattttaatttcacttatttttttattattttttaaagagatgaggtcttgctctgttgcccaggctgcagtgcagtcatatgatcatagctcattgcagcctcaaactcctgagctcaagtggtcctcccacctcaccttcccaagtagctgggactacagtagtgctccaccatacccagctacattttaaaaaaatttttagtagagaagaggtctcacttttttgctcaggctgatctccagctcatggcctcaagccatcctcctgctttggtctcccaaagtgttgggattataggcatgagccatcatatgtggcccactgccaggtgtttaggatacatgttcaaatgacactttcagtcttacttaccctatcatggggaaaattatgttagacatctttaaacatttgtccccttgaccttgactgttggagctgtgatgttctggcttccttagaattggtatttgctaaggggtgctgttcactactatttaccctctattggcaaagttacccagttgagttgttttaggtgccttagggaaggttaggaggaattcacagtatataatcatgttattgcagtatcatttctcaaagagctatagatttttcttcatttgaaaggtgttgtttgttatctgaatcctgtcctgaaataaggaaagttaccatcactctatttttttgcctcttggttttctctataacaagcatggaccctttcattaataaatcaaccttagtaggctacctatttatttcagtcctgggaatttcattatttaataatcataactaaatatacctgtggggcaggccactttgattaccatattggctttatgtgtgacaacaacatttaactttgtgtagcctctgatattctggactccttttcttcctttcaaaaagattgtcatatatttatttaatattaattcctctgtgaaatgtggcttacataaacacaaagcatttcagaggggcagtatgccaatggaaagagatttgtttatttaaaccaattatgactatcgtattctcctcttacccaatctcctttgcagatagaagtggttatgttactttgatctagcaaattagttatttaaggaagtctttgtgcgggggcgggggggagtatttaaggagatatttttgctgcctagataaaaaggctaaaatgactgatctaatcactttgtttatttctgccttgaaagcagatgtaaaggtaaactagaaaagccatattataaccatgataaaataaatcagaagggtcactaaaatgctggccctgtcattcttcatccttagaagcattacccacaaatttttatctttgaacttctttctaactgaataacaagactctatccctatagccaggttgtctcttgcagataaaaacattccttatatgaataccttctaaaatttctagcagtattccagtcaacagacagcagtaacaactaaagtactttccacatttaacatgtagtaaatacctgttaacgtccctagctactgaattatttagatttctacctcttcattatagcaagaaatttctgtcatatcaaatgcatttagtctgggctaaggataagtacaggttttaatcaagtaactgagcacacagattttcaagctagtatgctaaatctagaatctatggcatgtttaccaacgccataaattcagcctactcactaatatacttttcttcttgggcaggcaccaacagaatccataaagacaaatatttctcagggtttttcaatatacactagcaaagttttgtttttagcctgagaaaaggccaatggatgatgataatcaaatgaaagaatgaataaataaatacagatagaatgaaaaccacagcctttctgatagaaagagctattttcttgaaaataaaggcagagttcaagaaaggagagggttggagaggatgagccacatatttttgaataaactctgctcaaatttctgactaacctctgaaccacacttgcatgggataaaattaaccatacagatttaaaaattacactgagactggagatgttatcaaaaaaccggcttttataatttaggttgaaacaagtttaattacctgctaaaacaaaataattcagaattattcatagaaatatatgtaatccaaaatacaatatttacaatgttaaggataaaatgcaagtttttcaacatacaaagactcattctcaaaaacagatacagatatataacctgatatgacaaatgtgttgcagtaagtagacaaagattataatacatatttttctgctcaaaaagagaaaaggaaatatagatccagtgaataaatgaatagaaaatcccagcagaaatatagaaatgatgaataataatagtagaaattatggaactgaaaaattaatgaaacaaaaaatattgaaaagaatatatatgactttaacaacaaaatgaagatcacaaaggaaagaaagacatgtcaagaaaattttgtattttgatgaagagactaaaatgatttggaaagagagtcttagagatctatggaataatatcaaaagatataacctactgttaatcagaatcagaaaagaagggagagagaataaagcaaaacaataagatacaaaaacaatggacagtataacctttagttggtaagacatatacattttttattgttaggtaacaattatacatagggtacataatattttgatagatgagtacaacatgtaatgatcaaatttaggtcagtgggatatccatcacctcaaatatttattatttctttgtattaggaatattccaaaacttctcttctagctattttgaaatatataataaatatttttagctattatcaccctactgtgttgttgaacattagaacttattccttctatctagctgtatttttgcaccaattaaccaacctctcttcatccccctcatcatcattctcaacctatggtagccaccattctattctgtacctccgtgaaatcaacttttttagctcccacatataagtgagaacatgcaattttcatctttctgtacctagcttattttacttaacaaaatgttccccagcctcatctatgttgttaaaaatgacagcatcttaccattttatagttgaataatattctagtttgtatatatgtaccacagtttctttaggaagaacataaatttcaaaattagttaaaataagctaacttcaagaaggataaacatgaaggtaaccatttgtaggtataccattgttgaaaggtcaggataggcttgcttatgatataacttacaaactctgatatctcagactcctaacacagaaaagtgtttgttgttgttgttgttgttgttgttgccttgtgatagactgttatgagcattctcttcttagcatctcatctctactgtgacccagaaatcctgggggcattcatcctgccatgcagacattttggagtcctttccctctctcaacacaaacaagagggagtgcatagagaattcatacactcatttttaactttgtcatgcagtcaagaaagaacgcacctcacttccactcaaatctattggccataataagtcatgtgctccaatgtaactgcaagggtgagctggaaatgcagaagagtccacgggacatttggtaagcccaaagtgtctgtccagaaaggaggtttaacaataaggaagcagtgtcaaatgctgtagtgaactaatgatgaatgataatttcaaattaggtcttagattatatcagaagcctgcaaattatagatcatagatcaaattcctatatctatctatctatctatatataactttatttgaatacagctatggttatttatcaaatattttgtctattggagctttcttgctacaacagcagagtttgtggcagaacctgtatgataagcaaagactaacatctttactgtctggacatttcagaattagtttcccatcccctaggttacatgattacaaaattactcatgatttttaagctttcaatggatagtatagaaccaatgagggaagaaatgataggaagattgagaaatcagattaataaagtagatacaagttattttagaattttgctggagaagaaaatataaaaacatgttttcaaaattttttatttaggtacttatttacttgttgcttattttatttcatttagacaaatatttattttatgaaacctaagaatattttaagccacagtgcaactctgaagatgcaggtatatgataaaataattgaggaagtgtggctctggaatagtgagaagagaatgagattccaaactctagtgaaagacatagaacaggcttgttaatgatgacagcattaaagttaccctgagacaagtttgaaaacgagaaaaaaagccactatacaatatttttataaatacttttattttttgctaattacaaatttaagttgatatatattaaaaatgtaacaccatagaaatttagaaaaggagaaaatgaatttatcccgtaacacgatcattctcccatgggtgactgttgatgaaaagttgccatcagttcctctgtatttttctaggcatgaattagcatacataatttattattatttaatacaaataggatgaaatatgtactttttaatctgctatctttaccatcacttgtcaattatgtgtagatctctcctttttcagagtgccagacagaataccctttatgtagctattcccagtttcatcatctcaattcatgtgatgtgcattaatttatttgtaagttttgttataattattgaaaataatatgcatgtctataagtgcatgttttattaatatttctatagaaatgctagaagtagaatttgaagtaatttaaaacagtaaaggaaaaagttgaaggaccgcatatcaaatagcactcatattatccagtaagaggcaaacaattcatcagctacatataagagaaaatggctatattcagggcttgaagagaatggagacagcctgcaacatctaatgccgtatgacactaatcttccaacatttttttaaacattataatattactttatcttttacctctaaatacttacacagcttctggatgtccaatagctaaccgtaaagtactttgtgatgaaaatgtgatgactgacagtggagctaatctttctgcagttccacaggccttcctttgttattttatctggatgtcatgttaagttactaaaaacagcccttttgaaaaaaagaatagcattctatggatatgaaaatgtctgattgcttcacattgacttgaatgaaaaaagcatgcgctgttcaaaaagtgtgtagttggaacatcggtaagatggaccaaagttgaaaatgaaagtctgggtatttttggcagtgttctcaagtcaacctgtgttaatttatttagccattatgatataatttactgattgaccttgccaatctttataaaatagtcttccaacacagaaattgtacttatagtaaaataaattacagaatctcacaaggcaagatggctgactagacacagctagcaggagcatctgccactgagggaccaggacactgggaagactggcatactctgagcagatctttggaatgaagacattgagagtgaatagagggaggatacagacactagtctgaagggtgaagaagtagggaatgctctcagcaataccatgcaccaggactcattcctggatcccaacaactcctggggaaggggtgagttgggcacatgctgagcaactccctcttgccatagatccctggaatcgtggcaacaggagaccccacagcccctacaggcacttgagctggcagggactgctacttagagaggtggtaggagcaggcctatagcctgtgcagagcccagagtgtttggtgcagaaacatctgcaggggagcatggcaagggacagccatccccaaaggcttgccatactcctctagaagactctagccttagggggactgttagacctgaacaatgtagggtaatctacctgggagatgggactagtctgacctgagcactcttctgtttgctggcctgtcccagggccccagcctggctgtgcctatttgcaatgcagacttggatgcccaacctggatgcctcccaagggcccaaatcatagttcctacactgccagactctacatgaccatcagacagcttcaacagagtggcccctgacaatatgcaccaacccacccaaatcctccccacagcacagcctcccctgtgccactttgccaggatggacttgcccacagccacccccattgcttttccagcatgcatttgcatgggcaacctttcctcccctgccctgctggcacatgagtgtccataaaccacactgtaccactgctgcacactagagcatacctgctaccccatgccattgcagtactgtgatgccatgctgccattgccagcccaaacatgaaggtggttacctgtggccccaatccccactctttgttgccactgccacaggcatggacacacagaggaaaaccggtagccctgtgccctgccccatgccactgccaccaccactggcatgaaggtgcacatggaggtcaccagacctgtgccatctgagccccacccctgcatcaatactgtcatgggtgtgaatgtgtgcccagactccagcagcttcacgcctcccaaaatgctggtgccaacacctgagaggaggctggcagcccagggactgctagcaccctgtcccagctgaggggcatgcacccaaccatgtggctatttctactgtcacataaactgaatacaaatctctctgccactgcctgaaaaattgtctcactggctggcatcgctctttggaaggttgtggtcagtggtctgggaatacttcaagccctctagtgaagcaggttaccaacattgagaggggagagaacaaagccagaggcccagtaccagccccccagaattagtgtacacaacccaggaatgctgagctgggccttgccctaacaaaaaaaaaattcaccagaaacaaatccaattgactaaactcaccttataccataatcaaacccccaaggacatcaaataagataaaagcaaaacaaaaacaaacccatcaaaaggacatcagtgtcaaaaatggaaggaatgtcaggccacacagatgagaaagaatcagcacaagacaagaactctggaaactcaaaaagccgaaatgtcttcttacctctaaacgagtgcactagttccccagaaatggttattaaccaagctgaaatgcctgaaattacagaaatggaattcagactatagataggaaaggagatcagtagcattaaggagatagaagaatttcagagctcaaagaactgctctctgacataacctggtcagacaaaataaagaaaaaaaaagtaaagaataatgaacaaaatacagatttatgtaaagagaccaaatctttgactcactggcatttctgagaggcagggaaagaaagcaagctggttgggaaaatacattttagtatatcgttcacgaaaatttttccaacctcactagagaggccaacgttcaagttcaggaagtggaaagaacccctgtgaaatactacacaagtagaagatccccaagacacatagtcattagattctccaaagtcaaaatgaaagaaaaaaaatattaaaagcaactggagagaacgggaaaattacctataatgtcttcaggctaactgaaaacctttaatcataaactttaagagccagaaaagaatgagggcctttattcggcatttttaaagaaaagaatttccaaacatgaattttatatccagccaaactaagcttcaaaagttaagaaataagatcctttttggacaagcaaaagctaagagaatttatcggcagacttgtcttacaagagatcctgaagggagtgctaaacatggaaaagaaagaccaatacttgccactagaaagatacacttaaatacatagaccactggcactataaagcaaccacacaaacaagtctgaacaataaccagttaacaatatgataacatgaactaatccacacatgtcaacactaatcttgaatgtaaatgatataattgccccaattaaaaggcacagagtagtaagttgggtaaagaagtaagacacaacagtatgctgtgtttgagagatccatctcacattcagtgacacccacaggctcaaagtaaagagatatgggaaaaaaaaatctatcaagcaaaaggaaaacagaaaaatctagggtgactattctaatttcagacaaaacagactttaattcaatgaagatcaaaaaaagacaaagggcactatataatagtaaagggttcaactcaccaagaaaaaataactatcctacgtatatatgcacccaatacaagagcacccagattcataaagcaagctcataaaaacctataaagagacttagattaccacaccataatattgagaggcttcaaatcccactgacagatagacagatcattgaggcaaaacattaacaaatatattcaggacctgaacatgacactttaccaaatggacctaataaacatctacagaacagtcttccccattaaaaaaaaagagaatatacattctttgaatctgcacctggcacatactctaaaatcgaccacacaatgggccataaaacaatgcttagcaaattaaaaaaaaaaacacacaaaatcatatcaaccatgctgtcacactacagcccaataaaaatagaaatcaatactaagaaaatcactgaaaaccatataactacatgggaattaacctgctcctgaatgacatttgggtaaataaggatattaaggcaaaaatcaagaaattatttgaaattaataaggacaaagatccaatataccagaatctctgggagccagccaaggcagtgttgaaagggaaatttatagtactgaacactcacatcaaaaagttagaaagatttcaaattaagaacacaacatcacaactggatgacagagaaacaggagtaaaccaacctcaaagctcgcagaagaaaataacgaaatcaaagctgaactgaaggaaattgagatgcataaaacaatgcaaaagagcaaagaatcaagagttgattttttgaaaaaagtaataaagaaaaaaagagcagatctaaataaagacagtcaaaaatgacaaagaggacattaccatttacccccacagaaatacaaaaacccctcagagactagtaggagtaattctatccacaaactctagaaaatctaaaagtaacgtacaaattcctgaacatatataacatcacaagactaaaccaagtagaaattaaatccctgagaagaccaatgagttccaaaattgaatcagtaatagaaagcctgccccctaccccgccatcacccacccccaaaaaagccagggccagcagattcacagccgaattctatcagatatgtaaagaagagctaatagcattcctactgaaactattcaaaaaaattgaggaggaggggctccttcctaactcattctatcaggtcagcatcaccctaacaccaaaacctggcagagacacagcaacaacaacaaaaactgaggccaacatccttgataaaagtagacgcaaacatgctcaacacactactaacaaactgaatccagtagtgcatcaaaaagcgaatccatcatacaaataggctttattcctgggatgcaaggtttgttcaatagacataaatcaataaatgtgactcatcatgtaaccagaattaaaatttaaaaaacatatgattatcttaatagacgcagaaatggcttttgtttaaattcaacatctcttcacttcaaaaaccctcaacaaacaaggcattgaataaacatacttcaaaataataagagccatctatgtcaaacccatagccaacgtcatatcgaatgagcaaaatttggaagcacttcccttgaaaactggaacaagacaagcatgccctctctcactactcatactcaacatggtaaaggaagttctggctagaaaaatcaggcaggagaaagaaagaaaaagcattcaaataggaagagacgaagtcaaactattcctgtttggagatgatacaattccatacctcgaaaacccagtagtatcttcccaaaacttctttcatctgatagacttcagcaaagttttggcatacaaaattaatgtaaagaaatcagtagcattcctagacaccaacaacatccaagctgagagccaaatcaagaacacaatcccattcacaaaaaccataaaaagaagaaagtacttgggaatacagctaaccagggaggtgaaagatctctacaaggagcactacaaaacactgctgaaagaaataaaagatgacacaagcaaatgcaaaaacattccacactcatggataggaaaaatcaatatcattaaaatgaccatactgcccaaagaaatctacatattcaatgctatttctatcaaactgccaataacattctctacagaataagaaaactattttaaaatccttttttttttttttttcggaaacagggatgctctctgtcatccaggctagagtgcaatgacacgatcatggctcatgacagtctttacctcccaggctcaagtgacactcccaccttagcctcccaattagctgggactacaggcatgggccacaaccctcgactaacttttgtaatttttagaagagacagggtttcatcatgtttcccaggttagtctcaaactcctgggctcaagccatccgctcttctcagactaccaaagttttggaattacaggcatgagccactgtgcctggcttaaaattcttacaaaatgagaaacaagaacagatagccaaagtaattgcaagtgaaaagaccagaactggaagcatcacattatcccacttcaaactgtacaagcctgcagtaaccagaataacaacagacatgtaggctaacggaacagaagagagagcccagaagtaagtcagcacacctataaccatttgatctttgacaaagtctacaaaaacaagcaatggggaaagaactccctattcaataaatgcagatgtggtaactggatagtcatatgcagaaaattgaaactggaccccctccttacacaatatacaaaaattagctcaagaaggactaaagacttaaatgtaaatcctaaaactttatgaactcttgatgataacctaggaaataccattctggacgtaggactaggcaaagattttataatgaagataccaaaagcaattgcaacaaaaacaaaaattgacaaatgggacttaattaaactaaacagcttttgcatagcaaaagaaactagcaataaacagacaacctagagaatatgagaaaatatttgcaaactgtgtttccacaaaggtctaatatccagaatctataaggaacttaaagaaatttacaagcagaaaacaaacaaccccattaaaaatttggcaaagtacatgaatagacatttttcaaaagaagacatacaagtggccagcaagcatatgaaaaaaagtttgacatcactaatcattagaaaaatgcagattaacaccacaatgagataccatctacaccagtcagaacagctattattaaaaagtcaaaaaataacagatgacaaagaggttgcacaaaaaatagaagctcattcactgctggtgagaatgtaaattagttcagccattatggaaagcattttggtgatttctgaaagaacttaaaacaattaccatgcaacccaaccatcccattatcaggtatatactcaaatgagtataaataattatattcatatactcatacagaaagacacatacacacatgtgttcattgcagcactattcataataccaaagacatggaatcaacctaaatggccattgatatattttagctgtgtccccacccaaatctcatcttgaatcatagctcccataattcccacatgttgtgggaaagacccagtgggagataattgattcatgggggcagttcccccatactgttctcatggtagtgaataagtctcatgagatccgatggttttataaggggtttcccctttttcttggctctcattctgtcaattgcctgttgccatgtaagatgtacctttcaccttctgcagtgattgtgaggcctccccagccatagggaactgtgagtccattaaacctctttttctttataaatctcccagtctcaggtatgtctttatcagcagtgtgaaaacagactgatacagccatgaacggtggataaagaaaatgtggtacatgtacaccatgcaatactattcagccattaaatagaacaaaatgatgtcctttgcagcaacatggatggagctggaggccattatcctaaacaaatgaatgcatgaacagaataccaaataccataagtcctcacttaaaagtgggagctaaatatcgaggacatatggacacaaagaagggagcaatagacaccagggcctacttgagggtaaagggtgggaaaagcatgaggatcaaaaaactacttagtgggtactatgcttattacctaggtgatgaaataatctgtgcaacaaaaccccatgaaattcaatttacttgttcaagaaacctgtacatgtacacttgtacctaaaataaaaaattttttaatgaatatattaaaaataaataaaatagttttttaatttagcctaagagtgtgatgggtttaacaatctttgttttgcacacttattcaataaggttactactctccaattagtagagcctactataatatattccaggactaagctaatgtgcttagaatatgaagttaggcaagacatagcccctgttttaattaaactttcagcctagtgagaaaaaaaaagacaagcagttaaaatatgttattatcataggggaagtcagggtaccactggggtttgcagaaagttaaaataggtcatataaaatcagaaatttgaacagtttctttttttttttgaaggaaagcagagatcactggtagaattgaaagtagttcggaagaactgaatagcaggatggagggaatattgaaaaagggagatgagcaatatataacaaagtaagaccacaagagatgacttaattccagtttatcatctcttaaaggtaatgcacatttatctatttttatatttgcagaaattaaaggatttaaacaatttttaaacacaatattgtgaattttaaattttaaatatatcagtatttttcagagatgatgaaaaccatctcgttaaattacatttggcattgatttgccaagacatcaatataacttagttttctttcaaagttctatgcagttaaaacagagataattgcaaaatgagttaaaaatcacttgtttgttttttaaaatgttgcacagagaaaaacttgctggctattttcaaagagcaggtaacacaaaatccaaacctaattaggctcaatccactgccattaccaaaccaatagtaaagttacctataaagttaattagcctaaagactgttgatttgtattgctaaccctgagaagcatgtttcctgttttgtatgtatttgatcaagtagaaaatgaaatctgatgcaacaaaagacgttgcagctgtatattttaagtatgcagactgctaaggcttgactgctgtataaagagaagcaatgtatataaagattgctagcacattatgtaataatgataatctgctttactaccacatttccacgacagtgcaattacatttagacctctatttaatcacatttatctatctactgttaaactgggcatgacattgtcagccctgcagaatcttatagctgagtcgcagcttgcttgtggagttggggaattgcaaaataggttgaaagcgatattttctatgaattaatgagatactcacatcatctgcactcctcatctccattgaacaggtgcaaaaatggcaaagggataattgttctaaattttgttgtgcattgtgctgaaattattttctacaagcggcaacatgaaaggcttaaaaagattttaagaagactaatatacagcaacattaaaaatttaactcttgtacttgtgcatatgagctactaagattgtttccactagattttcatgcaaaacaatctggttttgattgttagaagaaatcaaatgtattcagcatatgcatgtggttcaccaaaaatttactgagtgcctactgtaagggtatcactttattaggcactgggaatacaaaaataaattcttgtgaagattaagttttggtctgtgcagactgtactcattgtttttcacatttttaaaacaagtttgtgtatgtatttatttgtttgctagttcgtattattctctcatgtaggctctattttgttgaccatggtgtacctaacacttgaaggaaggaagaaagaaaagagggatggcgggatgagaggaagaaaaaaaggaaggaagggagtttgggagaaatggaagaaggaaggaaggagaaaggaaagaatgatcccttcaataaaatgttgttagtactggaatatcagtatttccccaaatccagcagatgcctaggaacaacatatagatgtcttggaaaagtgaagaatattttcctggggagaaaaactgctgagactttacacatgtaaaatatatttaattagcccctcatatactgcacagttaggctaggtataaaattctgaattggaaatagattttccttatatttaaaaaagtttcatttttcctacttttccatattgttgttaagaggtttaaagtcattattattactttatatttgtatatgacatacattttcttcttgaaacatttagattttctctgccaggaaatcgtagaattaaaaactttagggatggtctactttctgctattgttcctgactcttaattaatattttcaagccataatcatagcttcaattctagaagatattcttaaattatttatttgatgatatcctccattacattatagtgtagcagataatagcacagcacctggagtcacaatgcctatttgcagataccacttctgcccttagtagcagtgtgtttaggacaacttgtcttaacttctctgtacttagaatttttcatctgccaaatgtagatcataataatattatctgctagcaaaacttgttttgctttgaatgaattgttttggtaaaccacttaaaatagtgtctgctataaaaggaatgcttcgttatcgtctttcagaataattcctgccatttcacttactttttcttgttttccatgtttgtttttattttatttttgctgtactttccaagagatttcctcaactatatcttctagccattttattgagcttttcatttatgctatctattttcaaccttgactgctttctattttctacaccattctcctagtagcattctctacttattacacaaatgcagcatctcatctctctgaagaatttaatggaagataatttttttatacttgcacaaagtttaaaatagtacaagcttattaggaaaaagaactggacttcactactaacttcatattgcttggctgtacactactcatctggcaaaacctcactacttctttttatattgctctttagttgaagcagactgacaattcctatgtcctttgaaaattgtgacttacatccttgtctctacctccatgttcatacagtgtattgcgtcagcttctttttgtgcctgtctgattccatcagcaccatgttttcggctaactccttttttttttgagacggagtctcgctctgtcgcccaggctggagtgcagtggcgcgatcttggctccctgcaagatgcacctcccgggttcactccattctcctgcctcagcctcccgagtagctgggactacaggcgcttgccacctcgcccggctaatttttttttttttttttttgtatatttagtagagacagagtttcaccgtgttacccaggatggtctcgatctcctgacctcgtgatccgcctgccttggcctcccaaagtgctgggattacaggcgtgagccaccacacccggcctttttgggctaactcctttttaatatccagatatcaaagttgctatgaggagtacctcttgcctgaattaggagatgatcttgaatacacaagcagtaaatacaaaagaacaggaggaaaaactaccgtttattttcatattatacttgcatgtcacctttagtacttcatggtggtcgttcagcaaaggagcaacttatatttgtctcagtaatgaatattagaaactcacattttattctaagtactgctagtttgtttggaccctgtgctgctctttggatttatctcatccaatataggataaccattatagaattttggaactcagagagatcttacaattacggagttctctacatgtgtgttccatatgaagagatggaaatctcagtggttaatggaagttttcacatttaattgagttagttgatagcaataaaagggctaaaatctaaatctctttattcattgttttctacctttgctctatattttatctatgaggtaaatgttgaagtttgaaaaagaatacaggcatggaaatagaagactaagggttaccttccagagatcctcacagtataactctatgatgttaaatttatcaaggacaaagtctgattctccaaattgtagattcaaagacttaactttctcaacactttgccaaagtttatattctatgatggcagacacatgacaaaaattgttaggagacagaatggcatgctaatttttaatatataatgaaaagattatattttcagtgatgacaataaggtgctacttatccagggtttcaaagcatttctgaataaaaaattacgttatttaaaaaataataaacctagcaagtgttgaccagaaaagtagttgctgtttgcgttttttataaagggttttaccatttaagatatatcgaatatcttccatctgaaaatatccattatcagtcatttaaccctataagcagaaataataatttctggattattgattattgttccctgttgccttaatacagtatacagaaagatatatatgtgtatatatacatacgagtatatatatatatatatatgtatatatacacatgtgtgtatatatacatatatatatatgcaggcaggctttgagaatactgttatagaaaatgatttttattggactgaaaaaaataagtcattaatctattagtaggttgtctttaattttcaaaacccctcttggaaggatagcatgataataatatagtatatagtgataataatgattactcattatttcaagcaaaaggcaatttgaatgtataaatgttgtcttaccatgtatcagttctagtgattataaatattacagtcagtgcaaactattgatatagggatgcttattacatttatatttacatttacttagccaattataatgaagaataaaggtcttagcagtacatatacaggcaaaattttgttaaaaccaagttcagatttagagatagggcacagttgtattatgtcattgcctcaatatttatcttaacctctgtgattagaagtaaatacgaacaagactgctttcttttcctgttaatgaagaattctgcagagctttacaaaatggatagtttgcttggctaatcgatatttagttgactctccctcctatgcccataatgggtgatggtaccaaatgctgaaggttgttttctgtctaggcacagcattccaacagaagtgccaagccattattaagaatggaaatataccaatcagtgtgaccataatttccagttttcccccagagccaataagagccccagtgctgtttgaggaacaacactgtctttctgatagtcaaaccccacctaagatcctggatataactaaacattgcatgtctagaacaaactctatataagacaaatatttcgtggatagaaaccaaggcaattatttaacaaatggcctaaatattattgttaaaggcagctcttcttatatttgtggtttcctagcagagaccctgacattttcacatattctagttcatgtaagagtgtgtgttccttcttatgtgttttgtctaaaactatgataccctgacaataaatgaacaataatttaatgatgatggccctggcttaccttccacccacacttttctcattctttgactaaatccaatttgttatccacagggctgccaccatgttgtttctttgttaaatgcatatttgaccaaatcagttaactgtttgaaattctttagtgaccctccccctttcatctttccattatgtatagaagatttcagatagtttagcattgtgtacagatatgataagctggctcttacttatcaatcataaaatttaatatgcatctgaagagtggtaattccaattatttgcagtttatctggaaatactgagctaactcctgaatgtctttacaaaacctttccctctcacctcaggcagtttccatacttgattatatacatgctagatgccatgctgttttactaatgggtccttcatgtctgtctgtctatatattgatctatccatctatccatccattcatccatccatccatccagctatctaactattgcttcaaaaaagataaggttcttaaattaaactatcaaaaggttatattatatagttcttgattcaaagaaaaagtaatataacatggtttaagaaaaaacattttttaaaaattatgtgcttttgatcaaactgctagatacagtatacataagagatgagaatttagactttgtacacaatatttgaaagtatttgttacacacagagtacaaaagtcagcattctatcatatttccttgactagtttacataataattccttaaagaggttaattaaaaaataattcaacattttagtactctttgatccaatggttttatttctggtaatctttaataaagatataattgcaagtgtagatgaaggttttatgcacaataccatttaatgtatcaaaactagaaataatctaaatttcaacagatgattaagttattgtgtaataatataatgaaatactattttctcactgaaaaacttagaagaagttacgacaacattaaaatataaataggataacattaagttaaggagttaaaattacatataaagtgtagtctcaactttgctaacaattatataaaaatcaattctaagaaattatatgaaactactaataatgattacattggatggtgacatacatttttttccttttttctttgtatttaccattacctgttttgcaaattctcctttgagtgtgcataatgtttacagtttaaaaataaactttacttaaaacagagaattaagcagaaccaagagaatgtggtaattctacagcagtgcttatagtgtctgaacataatctgttgtagtcttctaaagattattcttccttaaatcttatttaaacagttttgttaacaaacatatcaagtaagctatatgatctagttatagactttacatagtttcattaggttagaaaaaaattagccggtaaataccatttgacccagcaatcccattactgggtatatacctatatacccaacagaatataaatcattcttttacaaagatacatgcacatgtatgtttattgtagcactattcacaatagcaaagatatagaaccaacccaaatgcccatcaatgatagactgggtaaagaaaatgtggtacatattcatcacgggatactatgcagccataaataggaatgagattatgtcctttgcagggacatggatgaagctggaggccatcatcctcagcaaactaccatagaaacaggaaaccaaacactgcatgttctcactcataagtgggagctgaacaaggagaacacatggacatggggaggggagcaacacacaccagggactgttggtaggggacgaggggagggaaagcatcaggacaaatagctaatgcatatggggcttaatacctaggtgacaggttgataggtgcagcaaaccaccatggcacatgtttacctatgtaacaaacctgcacgttctgcacatgtatcctggaacttaaagtaaaaataaacggatggcatcatctgcaaatagtgatagttttactttacacaatgggaaacttttatttctttttcttgcctattgtcccaggtagaccttctaacacaatgttaaataacagtaatgagagcagacctccttgtcatgttcctgatattagggtaaaagctttcaggtttccacaattgagtatggcgttgactgtgggtttttcatggcttccctttatcaggttgagaaagttccctagtttgttgagtttttttttattattattatgaaagcacgatggattttgccaaatgcttttttctgtatctattgagttgagatgatcatggggggctttttcttaattctattaaaatgatgtattatattgacaaaaaaattagtcattgatttggtttggagatatgcaacagctttctcattggcagctcattaaagtgagttagtaaaatacctctcaagaaattaaagcatactttcttctcatctattagaatttcaaacatgtgaaaagacttcagcttattcagctatacgtatcaaaggaatacttaaattaacttttattttttacttgaggctacttttcatttgaacttttcaaattttcaaactaattgagaatttattgaacattttcttgttaaatattgaagagattatgtaattttgatattcctctgtggaaaatatcgcatcaacattaagccaactgttataaaatgtttcattgaaaacttacaggaactttggcaatttaatgcatcataagaaactctgagtgcttttatttcatcagctactcatctctgattatgtaactcagctaaagttacagttaacataggaaacagacaataaacaattgaccctaaatgatccctccaaaaaagcaaatttgcacaagagaaaaaatatgtattgggatcaaatagtgaagtccaaagcctttgctttaccataaaaaaaatagaaacatctccattgaaattatggaattacataagcctatgtctttatttaaaagtacctttgacctgtgcttcaccttacattaaatcgaaagacatgtaataataatagtaacgatgaccacttattgagcaatcagtatgtgtacatattaagattttttaaatattaaataaatcattttatttaatttaaataaacattactgaaacacaacatgcatatagaaaaatgcatctctttttttttttttttttttttttttgagacagtcttgctctgtcacccagactggagtgaagtggtgcgatctcggctcactgcaacctctgcctcctgggttcaagtgattctccagcctcagcctcctgagtaggtgggactatagacatgcaccaccatgcctggctacatttttttgtatttttggtagagatggggtttcatcatgtttcccaggctggtctcgaactcctgagctcaggtgatctgctagcttcagcctcccaaagtgctaggattacaggtatgagccacagtgcccggcctagaaaaatacataaatcataagtaaagaacttttgtgatttttcaaaagacgagtccgtcctgtggcaatcaccaacattaagaagtagaacacataggaaggtaacgtaaccgtggtcacaaagccaatgaacagcagatctggatctgaaatccaggtctgcctgattttaaaagcattgttttcataatgtatctttgatcatcataatttggtgactccagttactgtatatttatgtgagaattttattggttcattctaaatgcttcacaatttgaaaggaagaatcaaaattagaattaaaaaccctgcatcttcaaagtgactcggaaaaataggtgacagactttcttgcctaagatgggcttctactacatcagggtttctcatcttggtccgactgaccctggggtggataatttttgtcaacgggagactgttccactggaggatatttaacaccatcccaagactttactcactacatgccagcagtacacaccagctgtgacaaccaaaaccggttcctgataatgcgaaacatcctgcaggagggaaaattacctttggttgagaactgttgaccaacagtgaaaggtgattgtgtctaggatgtgccatttatgtcagttttgtaatatgtttcctctttattggctgaaactgagatgtataaataaatttgtttttcaaacttcccctaaatctggaggatgaaaaaacttaaattcaataggaaatatgcagtggaatctgcaccttcagaaataagacaaaatagacgggaaatggtggcaagtgctttcctggttttttcttctctgaataaaaaaatctataaaacaataaataagctgccaagttcagcatagcttagccttgtctttcataattccccatggtgtacttggaggaaaagactttaattcctattgaacttttatccaaatttggtaaaaagcaatataaatctctggtcctctgccattctcctacttgtcacatcatcactccttctttccagtgtgaggaatttagctgttttcaagagggttggaaactgtaagccatgctgcaattctggaaaatgtgctatgtatggattgcaacaaagtagtaatacctgatatcctgacatgggttaaaacattttaacttggcatcagatcaactgctaaataaatccacgtagttacttgagggtagaaacttgtacttacccactgtttgaattcaaacccttgaaacagtgtttagcacatagtgaaactaataatagctaatattcactaagtacttttataactaaaaagaataaatattcaaagagtatgttttccatattgatttccagaaaaaatatgaattctctctcacacacgcacacacactctctctctctcttaaaaaattatgctgtgcctccatgatccctatttaaatgaagaacttgctaccccaaacatatctcattacattatagaagcagtcagtcaactatgtgttttttatcatataataccaacattgtgctagaacatctgtaatttttaaaatgtattgcaaattaagggcagaaaactgcccatgaaatctaaacatgttggggtatattagaggaaaaaataaagattaaaataactataatgtactttatttgaaagataaagggaaaaatttgtaacatttaaagtcacagtcactgcacaatgaacataaaagttaaacaattatcgcaataaaaatagctaacaaatgtatcacttacagtatacatctgcattactgatcactaataaatatttgctttcgaaccatgaagaaagcagaagggcatggacaaatgcgttcaccttggctatacaatttgtatttttttcatttttttgatgtgctttttgctgccaatgtaatcaataagtagattgtgtcatatcacaaggtgaagaaaagtaatatataaattttactatatacaacatactgttcctaaatatcaagaactcatggatgttatttgggtttgtgtacagctttattctaccatttgcatttcattatatttgcttttttgtgcctttacctgtactgtttcctttgctggaaacatgttataccttcttaaaaggtattattttcatttaatccattattgaatgtagccttggttggcaaatttcctgaggctatcaccttgaatcagattgcttttctataaacttccgctgcatcctctataaaaacttaacatggcacccactacactgaattataattggtagtttacttatctgcccttctatatttcctgtgaataccagtagggaaggattcatcttgactttactacatgttaagggcttaataaatgaatagataaagaaggaaagaaaagatgaactaaatgttaaatgctcagtataagcacacaggcagagagcaatgtgctccaccaaaaaccagtgcaacatagcttatgtaaacaaagacagatttcctaaataaaagtttgaccttaaaagaaaaaaattaatttcaaggaaaaaagtaaaagccttattgcaggaagttttttctcttctaaccatttcatacattttatctttatatttaatatgcatctttagagggagaaaataattataatttataaatatatgcaatgctgtgtaaacaaaacatgccagcacgcaatgtcatctaaagtctcaagctggtataatctcaaatagacttccaaacagaaatttaggcctctagcttcaaaacttaagattatacctaaaatacatcattcatacatcgttaccaatatcagaactcacccattaaatcctacagtgaaggagtgtctgcgctcagatatacacaaaggtaatttgacagttgtgcagtaaatatttagctgcagggacctaaaattgccagagtttataggcttgggcatttgatgtcacttctggcttgcttttcagggctaacattttgcagtgtaagctgaattgttaactcctattttttttttccccctgagttgaaggtagttttggggctatactaaatctaacaatcttggccagacaaactgagaatgttgctgtgttgagcttgtaatattaacccaataaatttcccggtgtttaataagattaatgcccctgtaacctaattcacaactgatggcagctttaagaccccttttctcctggtaggggcaggcttccaaatgctatggaggcaaccctcagcaaaataaatggtactaggcaactatttccaaataactactgcctcctagggtaagatactcacattcgttttactgccctaattgtagaatttctctccttatctttaatcaattcgggggaagtttaaaagcaattcaaactatactttttttttcagatgtatttcaaaatcaaagaaaattttctctatcacttcagagatggtagaagagaaggagaaagaggattaattcttatgtatctgcaattggcctttctgagaaccaagcatctctataactggctgtaataatttactcttgtgtggaagtgcacataaatgacagtcatttttattataggccttgagaaagcagaattcatgtttattagacatatttaatttagtgtctcacacagtgctcattcacaagcatccataacacattaccacatagaaggaaaaccacagggcacctgaattcagaaaatacatgcaacatagagcattctgcatgaatcgctatgcattatctggtgaaacccttcaggaggtactctttctattagagatatgattttaactagcttagttccctcaactcaccaagaggtttgtgatgttttattttttattatctcctttataattaaataaccattgggtaagatgtattcaaactaaactgaaatcgctctcatttggcaagagcccaagtcttaatattaacacatgtttaaagacttttagtaccatgatgcaccaaatgctcatagaaaaatcggcattttccccgacagatgaacattgaatctattatttattattgcattaaatacatgccatatgcacactcagggaaataacattacgcatcaattccaagatacagtggtgcccatattacagggtgccttgtttccagatcataaacttgacttcaagtttcatgtttcggaaagtacaaaacttctattaactattcatcttaagaaatgcctgttgctttatgtggcttgaagtaacataataacaaaggaaagaagtaacaaaggaaaaggcagacatctctgatagtcacttctagttcttctcactaagcaggtggtgataaccttctttttaatagtcaaagaaaatataatgttttccaaccaaggtgtgaagaaggaaaaatcaactaacccaatattgaattgtggtagcaatttaatactaggtccatgattttttaaaataaatttttttctgttgttttttctaattcctactgtccaaatctgtaaaacacggccaataatgtactaacatcatagagttgcataaggattaaaagaaataacatttgcaaagtacttagtgctatgcaaagtaattagcatttggaaaagaataaataataaatgtttaatataattgttcttataattatcatttaattaaaagttttaaaatgtagacctcacccttggagaaaaattttactattcgcttgaaattttaccttcaaatatgtatttttgtttcattcattagaagatttatggagctcttctttcttccggcattttgccagacaaaggatacgatcatgatcaaaacagacataattctttccctatgcatcttgcaaaatagttgagagagagacacaattattatattactataaattgtaatactttttagaaaggaaagaaggtggtaagagaactttcaagaagatctaatgtaagatactattgccagttaaaatacagacaggtcatgcaatatttaagaaattcttgtgctaaaaatatgcgttgtttgtttgaaattcttagttgaccagtcagcctgttttgtttacgaaatctggtgaccctaatctgagtaaagacttcctctagaggaattggctagagttgagaatttaaaaatgaataggcattggcaaggtgaaggagatgcagaattatggagctttactaagtcaagagcgtacagcatcttcaaatatcctaagttgggaagcaacattagtgccttttaaaaatgaaaagtacagtatagctggagctcaaagtgtgagagaaagcatgtttcatgtaactggaaaggtaggtaggtctagataagcaaggatcttgatccatattttgattgactagaagtcactgacaggctttaggcagaagagtagcatcagatttgcattttaaccacaggctcctttccaaactcactttaagtgcatgactctcttggcaaagccgctccagtatgtacttattgatgagtcaaatccccaaggaaagtcaaggaaaaaatactaaatatatgaacataaacagccacttggaaagggtaagcgtgttgacgtgctgtaatgggtgtctaaatgctgaattctacaggtgaaagacatgtcagagatgagtactatggacaagtctgagatggtggtggctaaatatttatggttatattcaattgttatttttaccaggataattaccatgtcaaaagaaatgcatgttggaaagatgcttggtacatatcatcaaatccctagaaggcgatccttgaaatcgaatattgtgaaaattatgtaggtatattttgccctattataatttatgaaggacattttgttttactattgactacccagtaacaattaacatgaagtattagaaagaggttagatttttcaaaagacactgtcctgagtttaaattttggctctgccagtttttacctatatgatctaaggaattacttagcctagctaagctgaatctcctcagttatgacataagaattattcctgccttttctcccttcctccctttgcccagctaactggattttggaaagcagtcagcgaatcatactgttctttggattctactgtataataaagatgctatgatagctactcatatcattcaatggatactcatttctgttttaaaaagtgtagttagaataagaaggtggaaagttgtttagataaagctctcaaataatataaacatctgggagttagtagagaaaagaacaatgttgaacatagctttagatagttcattttatttgaaagacaaataaaaaaattatagtcattccatgatgattacatgaagttgttaaacttaaacaccaaggaaaataattaacgtgtatatcacaatgctatactacatttttatgcatcactaataaagatttgcttccgaatctatgtagaagactgtgtagcagcattaataaacactgtccatctccccatttgatatttaaaatgaattttcagttttacaatatgatacgtcattaaacatgtatctttatttttctcttctccatatataggcaataacagatgctctgtaaatatttaagttaatgaatgagtggatgaattttagacatttgtgattaaaagcataacaaccacacaatacaatgtttaaatacctaaagcccacaaaacatgtagcagttttaatgtttcctaactgaatcctttgtttaagccagtaagatttgttcacagtatctgacactcctacacttgttcacattactgcttagctcttgctagaacttaaagtataataataaaaaaaatactgtcttccttttctaagccttatccaaccttcaactctgttaaagtaactttctttttattaatcattcactattaattcaagcctagtaagtgtcctatccttaggaaccatacaaccaaatgcctctcccatccatttggcaggaacattgtggcaacatgttgagcctcatcttgaattggtcttcacacctttgtgacaggaaggatgcagcacacgcatgtcagcttgtgtgcccacttaggtaatttcggcaaatttcaagtgttggtatttgcagaaacaccaatgtcctgtgaaaaataatgaaatgaaaaaataaaacgaaatgcacacgttagaaccaaaatccttgattataaggtttttaaatcaaacatgagatgacagagaataaatacccttttgaagacaatgctttcattttgatgagaatgtgagatactttgactcagttcaaatacactagccactgcacaaattaccacacaattcagttgtcacagcataagtgacagcagaaggaatagacatctgagaaaattaaagagaaagtcacacaaaggaaacaaatatgacatcgctggtaattaagaaaaaaaattcctttcttaggtacgtatcggggagttaaaaaatctgtgatattgacttccttttgagtcagcaatagaaaaactgggactaatcagaatagagtaccattataattaccgtatcaagagtgatgattattttgagcctattattaaaccatcagcatgatgacacagatggctcatggtcagtccacagctttgggggtaacatcacaaaaaccatacagaggtccaaagatggtggactagaccattaacagctgcagataatgttaacggccatcaagaccacgtgtgcaccactaagggctgctccagaaaagggtggcatttgagggataagagtttcttcagtattacatttactctaactcagaggtagattctaatatcattctaatcctctttagttaacctcctcttgatttaaccattgagtagaaattagaaagatatgattttatattttattctctgagattataatatttttgttggaggatgggggaatataagaattatattttatcttaatgcaaacttttaaattttttatggaaatctgtattcaaaataacctatccattttctttgctttttcctttaaataagataatatacttaatttgtcttacacaaaggaaataccaaataaatatttgttcatttccctggaaatatttcacattttatatattcttaatattaattttgatgaaaaatcataattgcatttacttttatatatggcacagtaaatatacgtgtgtggaagatatcttagatagaactaataatggctaatcaaacttatggaagcaagaattagtctgttgttaatagcacacagagcagagatatcctactgggattaaatgaagccaacaaggctttcttgtgaagttattcaacctatcatgtatagctgtacttattattttcagttttgtacagcagagaaatagaatgtaatcagtgatttcaatttaatgtgataagtcacacatcatattctgaaaagtatctatttgtgattgtgcaatgccataatatagaatctcacctctggacatattttgggtgaaaagggataactaaattagtatgttccaagatatatacatagttaaaatataaattttttcttacatgctactaacagaagtgagttataaaacacaaattttatcgtaaaattttcttggagaaacattgattgcccctaacttcatacaagataaagtctaaactttgtcattggagttataagccagtagctgtctggccttgatctatccaattagccttaacactttcagtccttttctttatcaaaatatcagcacttcttaaaatttctttgatttctgaacccttatacaaatctgatgaaacatatggatctgttccacagggggtacttacttattcagacttagttataataccgtatttacaatgaaactttatgactcccacagacgtaattcactctcatggcttaatatatacatgtattgcattacaccagaaaatcgccagaattacagtggttcacatgactttaagtactcagagtcaggaatatcgtcttatttatctttaaattcttaatttgcacagaattcaggacatagtagtccctaaacactgttagctaaagcaaagaataatccctgttggctttacttgagttatttaaaaaaccataggttctaaaaagaaatgcaagtgaatgaagataataggtaatccctcatggtgcatagatccatgtcattaataaaaaaacagttattttaaacaataataatgcaaatacattacacacacaaatatatatacatatatattcatatctgtatttatcatctatcaatctgtagtgaattttccaaatgtaaaatgtaaacagagaagattaatattttcatttcagcctcctttatggggatatctagctgcatgacaaaagcatgaccactggtgtcaacaggcacacattttaaggctcaatctctgtgtgatcccaagtcagtttttgagatgattagcgttttagtccatttagatataagttgggaatgatgatgatgataatgacaataataatctttcctatatacaagagtgaattaattttgatgataaaatatgccatgcaaaataactttaagttattttcaaatgctagctatcgttaagttgcagtggttatgaaacagtgtacccactcttctaaagaaaggttactaagcagaaaaaaaataacttgtaggacctgactatgttagagaaaaaatgtttacatgtggctaagagaaaaagagataggttatgtcaaactttaagttgcttaagttttgaaaaaaaaatgaaggagagaaaaatccaaatcttcaatgttctatatggaaatagatgtagctaatattttaaagtcttattctgtagctaaaatttggtgagagtctggtttttctagtacatttatttcagttcagtatatttgtgttttttaagaatgagggtggaggcacaaaggagagattaaataattattgcttttataaaagtaaactttctagtttattctatagtgttgctttagtcattcacaaccaaggggctaattttaaatataataaaacacagttttagtggtttttattatttttaaaattacttatataagagaacctgccacgaatatgttaagctaaaaagtgagtaataggtaagatcattttgaaaatattcaggggtgagtttctatgtgttcagtataggttaacatagtttgtattagctactactgcatacgagttagtgttcatgaggtcaacagaattatacaactctaggatatatattactcctattttgtagatgagaatatggagcctcagctaatttgagtaacttatcaatagaaacacaactcttgagtagaagcattgggatttcagcttagatctgactgacactggcaagagtactcattctgttctgtccattccatctcaaaaatctcagcctgctgtaatataaaccactgttccttaacccacttactttcttccctgtagagaaattagctcactcctatgaacagagactagcaagaggagtggacagaaaaggcaaagcagcagttttcagagtgttcagatagcgagaaactcaaaagggtttgaggtgtcaaaacccagccactgcctgcagcagggattaggtaaggtgtgctgctgattaacaagaaggtcgaaagtccatctggaaaccctggaggtatgaacaccaagggaaatgcttcaacgacctgcaggggatgtgttatatttgtcttcttgactcaggaactcaccaattatgtgaaaatgccaactggtcttcttacctgatttgaataatatctctcaagaagacaaaaatgtccagagacggtatgcataaaccatgcaaaacaaaaagatagaaataatttattttcctgaggaggcagaggcaaattcaggtacttcatgagcaggcaatttctaaaaagtgaaaagaaccaaaagaaaagaagaaataatctattcctgtagaataatatagaaatttgagattgaagatactttctcagttgatacattcttaatttacagagtcaagatgaaagcagcatatagtatgatcacataaaccacgaatacatggaagcttttgtattatgaatatagaggcacacatggacataaatatctagaaggagagttattaacctgtactcatggttgtttgagtgtaatgggatcacatgtaattttctctctctttgcaatactgcatcttcactattttctacaattaaaatggaatacttgtaagacaagtatgtaccttttcctggaaaagattccacagctttctgcaacatacagaaaatccacaagaattatgaggtttaaggaaatgttacatataggaaatgtattacacatacaaagaggtgtaggaacccccttagaagaaagagacatatttagtattggttatagtgatacagagcctaatgagggcatgtgcttttgttctggaatgctctgttcatatttgtcccaatttttaatctttctcttctctatcatatactttacttggaacatgtgtgtaatgaacattttctttttgtcccccacccccactgtcttgagttacccagtgctgaattgctctccaggttttaataatcctttcataataaacctttgtgagtagaagagtatgcatttaacatagcatcctgccactaggacatagacataaaacccaggtttggacaatcagatatgttcatcctcataatcctagcacgggttttgctggaaggtggccaaagcaacacgctgcgcttccatgggtagcagtgccagagcatgacagcaggataaagtccatggaagtggtacaagcgccgtggtccactgctctgtggggatggctgtggtaccttccctcaaactgctttgtggcggtgaatctttcttcttaattttgtaacataccaactatcattttaataaatccatttgattctttgagcatcagccaaagtcagtttctgttgtgtctgtttaaaaagtcttgactgatacaaagtgtaaagaaattatgacaggagaaaataaaataacttcctggaatgtatactttattattttgaagtttggaatagaaatttaaagatcttgggacacaggtggtgttttatgactttttccagtgaaatgttgtgactttggaaaagaaaggaggaaattgaatgtaaattgaatgtaaacacctagagcacacagatggtgttgaaaaactgaatttggtttactggaccgtagtttatgatattattacagcagtttttggcaaaaggatggcatacacctcaccagagctcgtagaaatgttttcatgacgttgctaaaatatatggaggctttaagttttataatgaaaaagaaaatgccctaatcaaatgatatattatttattatggataacatttattatgaatagatgttcattcataaaatatgcatttaatactttctttgtgtcaggtattatgttgctgaaaagagaaaacagagcaatctcttctttcaagaaatgtctcttttatactctccaagctgctctttaaccctctatgataatattttgttcatttgtttgcatcctatcatttgtgaattccttggagaaatgaaacttatcttctatttctttatgtttctactacataacacaatctctcatacataattggctttcaagaactgaatactgaatgaataaatgaatgtatgaataaatgaatagaagaaatgacattaccaatgagcagactaagcaattaccctcagtgagtgtttgatttgcattctagtaaacttgcatatcactgacatgaaggaacacgggaggcatgtatatcaaattcacagatgctgcgtaggtataggggatacttaaaacatatggtgccagtcagagatctcagcatttatcatccagcactaatttaagcaactatatcaaagaacttagaatagagtacttcactgtgtttttcttttcatttttttttgaaatttcaagttttattttagatacaggggtacatgtgctggtttgttacatgggactattatgtgatactgaggtttggagtatgaatcccatcacctaggtagtgagcatagtgcctaataggtaggttttccatccatggcctccctgcctttctccctctctagtaatccacagtgtctattgttcccatgtttatattcatgtgtgctcaatgtttagctcccacttacaagtgagaacatgtagcatttgattttctgtttctgcattaatttacttaggttgatggcttccatctgcatccatatggagcatgagttttctattctttatggctgcatagtattccatggcatatatgtaccacattttttaaaatacattgataagcacctcctaggttgttcatcaatgcactattcacattgtggttcttaaaaaagattcaactggggtcgggcacggtggctcacacctgtaaaacccagcactgtgggaggctgaggcaggtggatcacctgaggtcaggggtttgagaccagcatggccaacatggtaaaaccctgtctctactaaaaatacagataattagccgggcatggtggtgggtgcctgtaatcccagctacttgggaggctgaggcaggagaatcgctagagcctgggaggcagaggaggttgtagtaagccaagattgcaccactgcactctagcccgggtgacagagtgagactcagtcaaaaaaaaaaaaaaaaaaaaaaaaaaaagaaaagattcaattgattaggaagggcatgaaatagatctggcttaaaagagggtaataggacaaaataaaccaatacaatgtaaggataaaactgacagcacactcaatgtttgacaacagtgtaacaggacctctaataatatcagttttgttggtgagggaggaagaagccatccacacttactgaggtggccagggcttgaagaaagaactcttctcagcaggtctgaatttgaaggtccctgaaaaagtagggcacattcaggaaagagtgatcttcgtgatttagtgcctaataagcataatatatattttaacaacctgaggaaaggtagtttagaaacatttaacatgagcagcttgtaattagctcaagattgccatgtagacattagttatcagttgaaattctaaagtgtccagcacctttccagagtaggctccaggcagatatcaggagttgaggcaccaaatcaggagttcaaagagtaaaggaaaagagatgatggactaaagggtaagataaataaacaacctgagaccggggctattgccagaagctggcttttacctgtttgtttgtttggagcttgaaagactagtcagtacaacatttacaacgtaagggcagatgcatacacagagctatgacagataggctaaagtactctttataaatgtgtcttaaaatcacttctttttccagtaaactttttttttaataaaagtattcatttccagaaatgattggaatacaaatgtgacactgaacacaggtagacagttcctcttgcactgaaactctttgagtcatagctggattatatcacagagatcatagaagcaaacattagtttgagtgaaagtttattgtaagaggaatttgtaaaatcatttccaactcaagaactctctgtgtttactcaatttataaaagtgaaagatgttttaattagcataaatcacaaatacactgtgaaatattttggaagattgcatacacaaatgttaaagtaaaacaatgttgtatttaatgtttatcatttatgcacagaggaaagtgagtttctttttaaaattttaaatagtattcctcctatttagaagtaatataacacagactctgagactgcctgaattaaatctgagtttcaatattttctagctctgtgatcttcaacaagttattttttgcctcaatttccttatctactcaagcaagataataataaccttatcagtgctactataagagttcaaaatatgtacacatgttcctaaatattttctttacatttgtgatagcacaatggggttctattggcaataataacttagttatacattttaaaatagaattaaaactactgcaatgttgtttcctcattcaagaatgtgatctgctttaacatttacttccatcttactgtagaccttgcaataaagatttttaattttctccatgacagtgtcttttttcgttttagttataggcctgataaccttacaatttgtgatgatattgtgaatgttatctttttttaacatgagattatcatttattacagcactgcttttttaagaatactattaatttctgtatattgtgctgtctctaacaactactgaatgttcttctgttagtgtcaacagattacctgtagtttctttaattttccctgtagacattcatgtcatctctgaagaaaaaaagtgtgtttttctcatttccagcccttattattatggtccaatgtcttgtcttattgctctgataagggccctaagtacaatattcagcaaaaacagtggtagtagacatccacatcttgtcaacaactagttctaacatgtcattctaaggagatttccttattttctactttattaaaggttttttcttttatgttgtatgactgttgaattgtaatacatgtttttctacatattttgaaataattatgtagtatttttccttaatctgttcatgtggtaaataacattaatagatgtattacatcaaatcattaatgttggatcattttttcattccttgatttggagtgctattattttattcatgattttctcctgtgttgataaatgaaaactacgtacaattttctttgttagtaatgcccttgaccaatctttataacaagattattccagcctcataccaggaattagagacttggccttctattttatttttgtaatacattatacaagccaagaattattagttcctttattttgatgggaataactaattaaatagtttggcctagtgatttttagaaaaagtttttaccatgcatttaatttttcaaaatcatagtattatttatgttttctatgtctccttgagtaggttttgggagttataattttctaggaaattgtctatttcctctaaactatcaaacttattggcatagattaccttatggtttttatagtgtatatagttaccatagataaagtttctttattatttctggtgtcatttttggtgccttaaagctttgtctattttattaaggtttttttttttcctttaaagaaatagagttgttattctctatggtttattttctatttctttaatttctgctcttattgttatgatttttttatttggattcactttaagctgaaatttagagagtataaaaagatgtttagttaattgtatattaaccttaccattttagttacacaagtttcctttttttttttttttttttttttgagacagagtctcactgtcgcacaggctggagtgcagtggcgtgatctcagttcactgcaaccgacacctcccgggttcaagtgattcttctgcttcagcctcctgagtagctgggactacaggtgtccgccaccatgcccagctaatttttgtatttttagtagagatggggtttcaccatgttggccaggatggtctcgacctcttgaccttgtgatctgtctgcctcggcctcccaacatgctgggattacaggcatgagccacggcgcgtgatcaagtttccttttttaatgttctcccatgaagtatttttttttcaaattgcaacagaaatcagagtaatgcttgttatacaaaggagataatacaatggaaacgtgcacaaaggcaaaaaaacaacaaaatttcacctgcccgatcactaaacctctgtcagcctcattctgaagcttcattcaatgtttaaagccttgatagacacaacccttctgtcttcatgcattgcgcgttaactagaaacctacaatacatgaaatttctgactatatatgtgtgtgtgtgttttaataagttttaagtttatttttgtttgtatctatataaaaatttgtctgttatacacatcatcatttagttggctatttttttttttttgagacggagtctcgctctgtcgcccaggctggagtgcagtggcgggatctcggctcactgcaagctccgcctcccgggttcacgccattctcttgcctcagcctcccaagtagctgggactacaggcgcccgccactacgcccggctaattttttgtatttttagtagagacagggtttcaccgttttagccgggatggtctcgatctcctgacctcgtgatccgcccgcctcggcctcccaaagtgctgggattacaggcgtgagccaccgcgcccggcctttagttggctatttttatattgcatgtaaaaatgtgtgctaatattatgttgtattttacatatataagccaatatatagcatttatatataaaatataaaaattaatactctcataacattggtaatagctttggagaccttaggtgcttttctttgattgtactccccacctcttaatcctactcaaaattatacctctctcaagagagagttaatatcttgaattttgagcaacttgttttaattatctccatgatatatcatataccccctaagtcattacatattggttaatatgtttttataatatttataaacatatatacactggtatgtgcattatcacctatatagtattggcattatagtacacattctttttattttattgctatagttttttttctttacttacctctcactttcctcttttcctctcccctactcacttccactttccactacaagtcactggtactcattttaaaaacctggtggtcatctttgttttcttccatacattgttcctagtttaatcatatgtaagtatggcttaaaatgatacattttgcaaatactcgtagttacatacgaagtcaaaatgtctgtgtaaatatgcatatttattgtagaaattatttttataaactattgtgttttatattgcttattcgatgataatgaaaagtgttgtttcacctgatataattctatttttaaatggttacataatatttcattttgtgggtgcacatagttcacttcgctgttctcctattgataatcatctgctttacctaaggatacactataaacattgccttaataaatgtgcctatgtttaaaatatttgactaagacttctatctctttggcatagattcccaagagtgacattactgaagttaaaggtatttttaattttagttaatgttgctaaaactgagattaacatttgtatatccagaagaaattaatggaagtgtactttattttcatatctgtgccagcaacagttcttaacactcttttttaaaattttgccattctgttgggtaaaagtactatctcatggttactttaatttgtaagcccctgatcaatactgaattcaaccgtattattttttgtgctgaccatttagtttttattttctgtcaattgcctatttccattttttgcttatttttcttttacatctttcacctattaacagtttgtaagaacctttttgtagtatagacattatctctttatctgtcatttgttttataattttccactcaataatattacttttttattaatgttgtgttttataaagaatgtacaataccaaatgaataataacagtatttactaaactgttataggcatggtttcatcaacaacctcaaccagctatctcacatgtgagaaaataaaataatttccaggagcattcagaatattttgtgattttgaatttctccactggggaattgtcttttgtgattgagataaaatatttaaagactaaactttctagacaaataacaaaggagatttagctgtgtgccactgctgcacagtttcaaaagagaaactttctctcctgtaagcaaggcaatgtgcccttgagcaacagaatacataatcatcacagctggaattagaacaaatagtttagcatgctgataaaagcataattattgcatgaattgaccacttggatattttagctcttagaaagtcaaactttatgattgcttaactcctatgaatagcatcaaaatgaattcccaaaaataactaaatatatatatttactacttccaattaatcttatttgtttttcacccaaatactgtcttaggttatgttggggaactgagtagcatctagctaaagaaaaacaattaacatccaacactaagtgagtaatatttaattatgcttcattagaagtcatcaaaacaatattatagtaacaagtttagtctttaacagaactagaagagcaaagacaaagtttgaatatttttttaaaaaatacaacaaactacaataagtatagatggggaaagaacactaaagccaaaaggcaaggcaggaaaataagcctgatttaacatgacaaaccttatttagcaatattttttagaaactaagccccaactctctctggaccaagagtttgctttgtgataaatacatgacgcttaattttacaagacgcttgaagtgtagccaataccacttgtttaaaaaaaaaaaaccaaacactttattttgtcaaaacataatcaacaaccacgagagaaaaagttagaaataaactgagcgcttatcagaacgaggcactttacattatatgtatatgacataagccacaaaataaaattgaaaaggaatttattttatagaagaaataatgcagcaatgtgaagttgtgtaacttgcccagagtcccatagctagtaaatgttattgccatggttctagaccaaggcttcaagactcaggatggtatgatcaattaaataaccactcatctaaacatacacacacaaaccggcatgtgtccagtttctagttaagctgtacttagaaaaccattagaaattttatatataaaattttatatattatatataattttaaaattatatattaaataaaattaaataaaattatatataattttaaaattatatataaaattttatatatataaaatttctaatggttttctaagtacagcttaactagaaactggacacatgccagtttgtgtgtgtatgtacatatgtaacaaacctgcacattgtgcacatgtaccctaaaacttaaagtgtaataataataaaatttaaaaaaggaaaaaaagaaattttaaatgatcaagacttgtgtgaatttagagaagtaagaaaataaaaaagaaaactcaaggcaacagaaagatttggacagagcattgaaaagagagttgaaattggataaacagagtaagaaaaggacacttctacatggtaaaaaactattccatagaagttaaataattatgataatttttgtcatctccatcctaagagatgtgggattctgtttttctaaattaaaaatcaacaaaaatttaatttaaagtaaatatagtgtaattagagatcttaagccctagcaaagtgaccaaagctggcttgccctctgccccataaagtattcctagataatgcataatggttgttaaactaggagatgggtagtcaattcaatagctaagaaataacaattgtaaagaatagcatgtttagttgtacaaattcaggaaagacatctaaaataaccccaatccttcatgttaactagaaacctgaaatatatgtagcttctctcactctaaacttcaagggaaaacagattcaaaaagatgtttataggaaatctcatatatcaactcttccaatgggatggtccactgctggcctttggcataatctacacgtttgtgtgtatgtgctggttctcactggtttattttcttaccatggtgatgcctgaatctacagcacccaattgtggcaggcgttggagcagatgccttaactccatgtgccttttatggctaaatccgggtctgacactccacgcacattgttagctctgcacccactgtcaagcagtcctccttatctccttcaagggatttttaaaccatcgcactgcaacaaaaagggctcttctgttaccttcactggtgtttcatcaatgtggtgatattgttctctcctgagctggccttattttctgatgagtagagagacagacattccttgcatgaatgggatcgcttttctcgctctgtcctcaagtcccttttctatctccacgcaagtgcaggaggtagaggtgctgtcgacattaacagaaatcactctaggaatccaatagtcatggtctaaagagttcaagaaaagttatgtttttacatttgtgctatataattcccagtgataaatttaacatgaccagaaaattgattattgttcacgttttcctacatactttgggtaaacttgcattggtggtcacgtcaaagcacaagaacagagaaatccactggcagccagtggtcaatggtgggaaaatgaataatacagcatcatgactgtgtaaccaacattaaacaaatgatactaggaactgcagaggcaaggagatctatattgtttcaataggaattccaaagagccatgtcattgtaagcaataatagtgcatgagaaataatgttgctacctttctggtgataggagattagaaataaggcagaaactgtgtagctaaacataaagaaaagaaagagatggttcctggaccaaaacatgaaaagggtttgcttggaaaataccaagattcttcacaggtactgactaataagatagtaaacaaatgaatacatgcccatatattctttatctattttgctgcctctttgccaataaatccctatactttacatgatccatgaatgttataatacgttgtttaataaaagtgttcacgtagtcaaggggtgctacaaattatacttagtggggcccaacaaattctaggggccaccctttcttttcctttttatccccacttcttcgtacagattccaaaaacacctatgtttaaggcagtattttactacatttagtacattatggctttgtctatagctcaatggttgctactgatctccagaataatagaaagaagacaaagaaagaaagactgtttgctatgtttaggtctcaccatttgatcaccaacaaagctgatgggagaatgactatattttccaataaagaataccccagggtttgtggagatttgacaccttgtattcactgaaagagaaaaaaaaaccactattcttattagagagatctctccaatttgtgatgcaggggaattatgggaatataagaatatgatctcatgtggagttttaacgacttgttgtcctttgaccaaatcctagtgcaacggtatttattatataatactgttgtccaggtaaaatcctgaaaccttaaatatgtaactagctcaagcaactcggttataataacatgaatactgtggcagataaagtaggcagaagtatatgtagtaatgaaagaaggtaaaatatattttaacaccattaccagccaacacaatatgaacaaatgtattttgcctattgctttggcaaagcttagtctttttagtattcagcattgacaagcatgtggagaaatggcttctgattcactttagacaggaatataaataactgcaagtctctcgaagggtaatttgggtatagctatcaaaattttttaaatgtacatatattttattccagcaattgtacttctaggtagatgtgctcaatattttaaagaaaaagtttcttgcggcatgactataattaaataaaatcagaaaagaaacaatctaaatgccagaataagatattatttataagttatatgcttctactatgaactttgaagacattaaaaataatgtaaacatttctaaaatgcagagaatataatacattgttaaataaaaatagttacacaagtatgacatattattaaaatatatgggagatatatatgaatatatgtgcataggtgcaaaaagtttatttaacaaaatattaactatttttagatgataacattatgacttcttattatgagttacttttgttgtgggctttaaaattttccttttgcaaattttatacaatgaaaatagaaaactttataatcaaagcgcactacatgttataatttttaaaactgctacttctcactcacaaacataggcaaatacattatattctaactgcactggtttatttttatacattccactaatatatcagttttattaagataatcacatcaatgtttaggaagactctgaagtcagagcaatgaagaaataatacactgctttcaaaaagcacacattttacatacttactttacatatttaccttactcttaaccatatttatcccactgtgcaatagaacactagaacttattcctctcattatgttgtaatttgtgcccactgaccaacttctctctatcctccaccctctacttatgtaatatcaaccgtttcttttttagattccacatgtgagtgctatcatgtggtatttctctttttgtgtatagcttacttttacttaatatgatgtcctccaggttcatttatgttacaacaagtgacatggaatgtagaactgatgaaacaactgagataccagaccattaaaccccacagggaaacacgtagtaagatgcatacatcataagtacaccatataattaactttcacatatacagatgacttaagtcaaggtgtaaagtatttccaaaatgcttagatcaaggcatagaacagaactgtcatctcagtaagtatcttatgacacattttcagtcaagagccaccccccaaccacccttcaattcatagtcttcatattttccgtagcaatagtaatatctctcattattcagttcttgtcctatgattatgtctgtgctagatattctaaataaatattttatttaataatactaatattcaaataaaagaatgactatcaatattaatcagcttactccaagttacaaaaattgttaatagcaaatagaaaaaatccaattacattctctaagttattttaaatatacaaggaagttattattgactatggtcaccctgttgtgctaccaaatagtaggtcttattcattctttctatttttttttgtacccattaaccatccccaccaccctctccaaccccccacaacccttctcagcctctggaaaccatcctcctactctctatgttcatgagttaaattgttttgatttttagattctacaaataagtgagaaagtgatgtttgtctttctgtgcctggcttatttcacttaacataacaatctccataagagcgtttcatttaccttcaaacttaaagacattgtttgtgttatgtggactttcgtaaagttaaacaatggagtttggtaataactgcatttctaaaattggcttgataagtgacatcagcaagatggagggctaaaaagtccttgctcatttcctgtctaaaaccaaacaattttaacaactagtcagaaattaaaatagctctggaggagctccatagtacaaataaaatgctgcagcaactcagtggaacaacaacaaaacaagaatggtagcatagaaaatggcaggaagcattttacctgcattgccctataccctcatgcatcctttagatgcaatttctctacatggagaaaaagaagggtagaaaaatttcaatagccttcaatgctgagaactaaaaagcccttgttatctcatggacacccacacatgccacaacagaggacccctgcagtctttgtgaatgctaaacccagctgacagctgttccagagcccatgatgatatgtcccccaaccagccagacctttcattgtaccacctaccagagccagagccaccactataatctttatcctcggatggagccctggcactgcctgccaacatgtatatctaaaccctggaccagatgttgctatacacctctcttagccagcacccctgcatctacctataggcaagatattttctcaccaaagccagtccatgaagtcaggaagaagtgactcccctttcaagtgcacagacaagtgcacaagggtataagaaatataaaagcataataacaccaaaggaaaaaaaagtctctagaaaagaagttccaaagaaatagagatctttgaaatgcctgacaaagaattcaaaatgttttttaattggcacattataattgtacatatttatggtgtacaatataatatttcaataaatatgtatgttgcataatgataaaatgaaggtaattaccatatccatctcctcatgcttttaaattttttgtggtgagaatattcaaacgcctctcctttgactattttgtaatatgtaatatcttactcttaaccatatttatcccactgtgcaatagaacaccagaacttattcctcccattatgatgtactttgtccgcattggccaacctttctctatcctccacactctacttataatatcaacctattttgtttttagattagaaattgtgagtgttatcatgtggtatttctctttatgtatctgccttattttacttaatatgatatcctctaagttcatttatgttacaacaaatgacatggaacctaggactgatgaaagaactgagacaccactgcatcaaaatccaaagagaaacaccacagaaaatcggtgtaactggacagtggggaagctgctgaactcgcagacaaaccaccacacccatgtgcacaaacatcaagcatgacaaccaacacagtggcagtcccacctactgaaaaatccaccacacagctaaccagtctactgtgcctatgtattcttgcacttggcctgacagccagtctggcattggcccttcccatcagagagactgccctgccacatgggtcatgggcctgacaaccagtacagtgatggctgcacctccctgaaggcattgacattcagcctgcctgtgtctggcccataaaccagataaatgcccctcccctaaccaaaaccatgccactttcatcacagactccttcagcccagaccactgaagtagttgcaaacataacagacaaacattacaactgaagaaacttcacagaatccatgctcctaagtccaacaagaaccaaagccaatgcactgttcccaactgactctgtcagaaccatctgcaggaaaaatgtctcttgctacaaaagctactccagaaaattagaaaaagcaactgtttcaccagaggcacagacatcaatgtagggatacaaaaaacaaacaaacaaaaaaccaaaaaggaaacacgatcctctcaaagaacacgataagcttccagtaacagattcccaaaaagaatatttatgaaatgcctaaaaagaaattttaaaaagatacccaaaaagcaatgagatagaacagaatatgaaaaagtaattcaatgatatcagaaaaataattcataatctgaatgaaaaaatctacaaagagatatcattaaaaaaagaaatattggggctgggcgcggtggctcacgcctgtaatcccagcactttgggaggccgaggcgggcggatcacgaggtcaggagatcgagaccatcctggctaacacggtgaaaccccgtctctaataaaaatacaaaaaaaaaattagccgggcgtggtggtgggcgcctgtagtcccagctactcgggaggctgaggcaggagaatggcgtgaacccgggaggcggagcttgcagtgagccgagatggtgccactgcactccagcctgggcagcagaacgagactccgtctcaagaaaaaaaaaaaaaaaaaaaaaagaaatattggaactaaagagtgtaatgaatgaaatgagaacttaaacaccaagcagaagaaaaaatttctgaacttaaagacaagttttatgaaatattacagttagagggaaaaaaataataagaagaaacaatgaagaaagcctatgggacttacaggttaccataaagcaaacgaatattcactatatagggatgtcagaggaaaaaagatttcaaacaatgtcctgaaaacctagttaataaaataataactgaaacatttccagatcttgggaaagatataaacatctagatttaggaagctcatagatgccaattagattcaacccaataggattctcctgagatacaacataatcaaacaggaaaaatttggaagacagataattctagaagctgtaataaaaaagcattaaatcacacatgaggaaacttccattagaatatccacagatttctcagcagaaacattgcaggccagaagagaatgggaatataattatttaaaatgaagaaaagaaaaagtgtcagccaagaacactatagttaacaaagctgctctttcaaattaaacaaaaaaaataaagacttttccagatgagcaaaagctgagggaattcatcaccactggactggccttgcaagaaatgcttagggaaatgttttaaccagaaatgaaaggaaaataaaacaaatgaaactataaaacaaagtggtagaggtaaattcatagtcaaattcgtatatcattactgtaatattggtgtgtaaatcattcgaatccttactatgaagggtaaaagctaaaatgatcaaaaatagttatagatacaataagtttttaagaaatatacaagatcagaatgtataaattgtgggggagggtaaaagtctagagcatttgtatatgagcaaaatttaagttattatcagttgaaagttgtctatcctaattctaagatatttaatgtaagccccgtgataaccagaaagtaaaaactacagcagatacacaaaacagaaagagaagcaaattaatgcttgacactgcagaaaaacaccaaattacaaagatagacaacaagaatagaagaaaggaaaaatgatctataaatcaaccagaaaacagttagcaaaatgtcaagtggaatttcttacctatcaatgataatcttgaatataagtgaattaaatgcttcaatcaaaagacaaagggtgactgagtagatttttaaaataatcaactattttgtgccagcaagagacccatttaagctttaaggacatatataggctgtatctgaaagaatgaagaaaatatttcatgcaataagtaaccaaaagagagcaggggtggctatatttacataagataaaatagacttcaagacaaaaactgttacaagcaacaaaaaggtcattatttaatgattaagggctcaattcatcagaagaacataacaattttatgcacccaacattggagcaactaaacatgtaaagcaaatattaatggacatggaggaagaatcagggagaaatacgctaatagtaggagaattgtatattccactttcaacaacagatagatcaaccacacaaaaaattaatacgttaatactggtcttcaactgcactttagaccaaatggatctaacagacatatatagaactttctatcccaaaacagcaggcaaactaaaagaaatctaaaagactcaagactcaaataattaaaatcagaaatgaaaatggaaacattatagcagatgcctcagaaataaaaagaatataaaagaaataaataattatatgccaacaaattatatgctaacaagcagaggaaatgaataaattcctaaaacaatataatctactaaaattaaatcaagaataaataggaggcttgaacagcacaataacaaataaagagattaaagaagttattgaaaaacttccaacaaaaaaagttttaaaaaagtattggtaataattctttgaacgtttggtagaatttagaaattctaccaattcttccaaatttctctcaaagaaagaaattctaccaaacattcacaaaattatttccaatacttctaaatctcctgcaaaaaaaaaaaaaaagctatggaaaatacttccaaacacattttatgaggtcagtatcactttcatatctaagccaaagatatcacaagaaaataaaactacaagccaaatacttctaataaacattgatgcaaaaagcctagtaaaatattagcaaataaaatccaacaatacaacaaaaagattatacatcataatcaagtgggatttattcctggcatgcaagtttcgtttaacatatgcaagttgatcaacgtgatacatcacattaccagactaaaagataaaaacgcgttattatctcagttaacacagaaaaaccatttgacaatgttcagcatccttaattgataaaaactttaagcagcttaggtatagaagaaaagttccttagcataatataataaaggccatttatgaaatattcaccgttaacatcattattgatggggaacaattgaaaatgtttcaagatctggtacaagacaaagatgcttactctcactatttctactcaacatagtaatgggagtatgagcaagaacaaataggtaagaaaaagacgtaagaagcttccaaattaaaaaaaaaaagaggtaaaattatctctatctgcaattgagataatcttatacatagaaaaccacatatattccacaaaaatctattagaagtaataaactttaagtaaaattgcaggagtacaaaatcaacatacaaaaatcaatataatttctatatacaaatagcaacctagctgaaaaagaaatcaacaaaactatcctgtttacaatatcattaaaaagtatgtaattgactcttgaacaacttgggtttaaactgcatgggtaagtttctctgtgaatttttaaaaatatagtcagccctttgtattcataggttatgtgtctgcaccaaacatggattgaaaatgtagtattcacaggatgcaaaacctgtgtatatatgaaagactgaattttgtctccacagcttctgcagggccaactggagatttgaatatatgtgaatttttttaactgcaggggtcctgaaactaatccgccattgatacaaactgtacttaggaataaatataaccaataaggtgaaagatttgtacagtacaactataaagcattaatgaaaaaataatgaagacaaaaataaataaaaagatattccatgtacatgggtaggaagaattaatgttattaacatgtccatactacctgaagcaataaagagatttaatgtaatcactattaaaatttctatattattctttgcagaaatacaaaaaataatcctaaagtaattatggaattacaaaaaaatcctgaatatccaaagcaatactgaaaaagaaaaatgaatttggaagcatgacactttctgatgtaaaattatattacaaagatatattaatcaaattcatattgtgctggcctaaaaacagaaacaaagaccaacgaaacagaagcaagagcacagaataaattcaaacatatatgctcaacaaatttttgacatgggtgccatgaggatatggtggggaaaagacagtctcttcaataaacagttctgggaaaactgtatttctacatgcaaaagaattaaatttgactcttatcttataccatacacaaaaagctcaaaatgaataaaagacccaaatgtgagaactgaaatcataaaactcctaaaagagaatataaggaaaatgttccttgatattggctttggcaatggtttttttcgatatcacacccaaagtcctgctacaaaatcaaaagtaaataaacggaaccacgtcaagctaaaaagattctgcacatcaaaggaaacaatcaacaaaataaaatggcagcctacagaatgggaaaaatatttgcaaacctaatatctgataactggttaatatcaaaaatttatttaaaaaacttacaactcaattgcaagaaaataataacctgaataaaaaatggacaaagtacctgaaaattatttttccaaagaagacataaaaatggccaataggtatatgaaaatgtactcaacatcagtaatcattagagaaatgcaaattaaatataaattatctcattatgagttatcacctcataccctttaggatggctattatcaaaatgacaagagagcacaaaggttggccagggtctggagaaacaagaaacctagtaaactgttagtggggatgtacattggtacggtcattatagaaaaaagtatggatgtttctaaagaaattaaaaatagaaatactatatgacccagcaatacctccactgggtgaaaacttcccaagaagatgaaataactacctgataaagacatctgcacttccatattcattacagcattattcacaataatcaacatatgaaaacgatctaagtgtacatcaatggataaagggccaaagaaaatgtggcatatgtataaaaggaatattattaaacttaaaaaagaaatcttgctatgtattacaacatggatagaactgggagtcattacgctaagcgaaataggtgagacattgaaagaaaaatatgtcatgatcttacaaatatgtaaaatcttttaaaaatatgtaaatatgcaaagctaggaaacaaaacagtgattaaccaaaggtagcagtgagggatggcagtagggagaaaaaggtcaaaagatacaaagtagtatgtatgtaggataaagaagtctaggaacataatgtacaacatgaggactatagataataaaatgtatggtattttaattaaataagtagaatttagctcttcttgtcatctataataatgtaactacgtgacatgatagatatgttcaattgcttcactatagtaaacactttactctctatatgtatcctataatgtcatggtgtaaacctaaaatatacacaatacaatttaccataaacattgttaatggatatgaaacaaaaaagaagtaaactctgactataagaacaaaacctgaatcaagaagaaacagaaagattgagcagattaataacaattaagggagaagggctgactaaacatagccaggaagaccttctcgcaccaaaagaccagaccattaagaagactggtgcactctaagcagatcttcagaaggaaggcattgagagcaaatggaggaaggatgcagaccccaagctgaaaggatagaaagctgcaaaccctgcatgagattgcccagcaccaggacttgtccctggcccagggcactcctacggaaggggtgagttaaacaggcatggagtagcccacccttaccacagacctccagaagtctatctgcagaaaatcccacaacacatgcaaacatttgaactggcttggagagctgcttggagagttggcagggacagaattacagcctgtgcagagcccagttggtttagcataggaatggctgcagtggagcatggctaaggacagcaaatcctcccaggtttgccctgctccagaaggttggtttggcctatctagactgtcagacctagacagaaaagagctatctagcccatggattggggctagcctgatctgagcatcccgtctgctggcctttcccagagtccctatctggctgcaccggcttgcagcacagcctcagatgaaaaacaagtgctcttcccagtggccagcaccagagttctttccccagtaaactctttctaaccaacagagatgttctgtaaaccgaccccaccaacatagaccatccagacactacccaatactatgccagcatgtgctcgcacacagacttccctatccaccttgcctgtgcacatgcccatagggacattgccatcaggccaccaccagcacacataggtgcagacctcactgccaccaacataccaccaatgctggtattttaaaccaacaacaatcaaaaagacaaaaaaaaataacaaagtggaaaaattgactaagaagggcattatataatgataaagggattaattcaacaagataattaaactatcctacatatgtgtgcaccaaacactggagcacccacatttacaaagcaatttcttagaaacctatgaagaattgtactggtccaaaaaccaaaacccaagcaaatgcaacaggttagagagcccagaaatgaagttgcacacttataaccatcagatctttgacaaaatcatcaaaaaccagcactaaagaaaggattccagattcaataaatggtgctgggataactggttggtcatatgcagaagatggaacctggtccccttcattacaccacatacaataatcaactcaagatggattaaatatttaaatgtaaaacctaaaactaaaaaaactctagaaaataaaaacaaggaaatatcattttgaacataagtcctggcaaatattttatgaggaagatgccagatgcaattgcaacaaaaacaaaaattcacaagtgggacttaattaaattgaagagcttctgcacagcaaaagaaatatcaacagaataaatagacatcctacagactggaggaaaatatttgcaaactatgcatctgacaaaggcctaatatccggagtctatatggaacttaaggaaattaacaagcaaaaaacaagcaactgtatttaaaaatgggcactctgtacatgaacagacacttcctaaaagaagacatatacatggccaagaagcatatgaagaaatgttgaacatcactaaaatattactctgttctcaagctgctaataaagacatactctaataaagacatacttgagactgggtaatttattaaggaaaaaatgtttaatggattcacagttacatgtggctgggaggcttcacaatcataatgaaaggcaaaaggcatgtcttacatggcggcagacaagagcaagtgagagacaagggaaggcggaaaccctttatcaagtcttcaggtctcatgagatttattcactaccacgagaacagtatgggggaaattgaccccatgattcaattatatttcactgagtccctcccacaacacaaaagaattatgggagctacaattcaaagtgagatttggtgtggacacagccaaaccatatcattctgcccctggaccctcccacatctcatgttctcatatttcaaaaccaatcatgtcttcaccacagatccccaaagtcttaactcatttcagcattaactcaaaagtccaaagtctcatctgagacaaggcagttcccttccacctatgaggatataacattaaaattaaaagcaagttagttacttcctagataaaatgggggcacaggaattgagtaaaaacagtcataccaaatgagagaaattggccaaaccaaatgggccacaggacctatgcaagttcaaaatccagcaggacagtcaaatctgaaaactccaaaatgatctcctttgactccctgtctcacatccaggtcatgctgataaaagaggtgggttcccaaggtcttgggcagctctgcctctgtggctatgaaaagtacagcctccgtcctggctgctttcaggggctggtgctgagtgtctgcagtttttccaggtgcatggtacaagctttcattggacctaccattctgaggtcttgaggatgctggccctcttctcatagatccactaggcaatgccccagtggggactctgtgtgggagtttcaaccccacatttcccttccacactgccctagcagaggttttccatgagggctctgcccctgcagcaaaattctgcctggacatccaggcatttccatacatccttcaaaatctaggtggaggttcccaaacctcagttattgacttctgtgcactcacaggctcaacaccacatggaagctgccaaggtttgcggcttgcaccctctgaagcaatggcctgagctataccttggccccttttagcaatgggtagagtggctgagatgcaggacaccaagtccctagactgcacagagcagggaggccctgggccctgcccatgaaactactttttttttttattctagacctctaggcctgtgataggagggcttgcgacaaaggtctctgacatgccctggagacattttccccattgtcttggcaattcacatttggttcctcattatttatgcaaatttctgcagccagcttgaatttctcctcagaaaattgttttcttttctattgcatcatcaagctgcaaattttccaaacttttaatgtctgcttcccttttaaacataagttccagttgcaaaccatagctttctgaatacataaaaatgaatattttaacagcacccaaagcacctcttgaatgccttgctgcttagaaatttcttgcaccagataccctacatcatctccctcaagttcaaagttccacaagtctctagggcagggtcaaaatgttgctaatctctttgcaaaaacatagcaagaatcacctttactccagttcccaaaaagtctctaatctccatctgagaccacctcaacctagatttcattgtccatatcattattagcgttttggacaaagacattcaagtagtctctaggaagttccaaacttttcccaatttttcagtcttcttctgagccctccaaactcttccaacctctgcctgttacccacttccaaagtcatgtcaatattttgggtcatctttacagcagcaccccactgctggtaccaatttactgtattagtctgttctcatgctgctgataaagacatatctgagactggttaatttataaggaaaaagaagtttaatggactcaattttccacgtggctcgagaggcctcacaatcatggtgaaagacgaaaggcacaacttacatggcagcagacaagagtgaatgagagccaagggaaaggggaaaccccctatcgaatcatcagctcttgtgtgacttattcaccaccatgagaacagtatggaggaaactgactccacaattcaattatctcccaccaggtccctccctcaacacatgggaattatgggagctgtaattcaagatgagatttgggtagggacacatccaaaatatatcaactaatcattagagaatgcaaattgaaaccacatctatcacagtggctattattaaaaattcaaatgataatagatgcaggtgagattgtggcaaaaagtgaacacttaacacactgctggtgataatgtaaattagttcaggcattgtggaaagcagtttggaaatttctcaaatatcttaaaacagaaccaccatttcacccaacaatcccattactgggtatatacccaaaggaatataaatcattctagcatagagacacatcaacatgtgtgtgctttgcaacactattcacaatagcaaagaattggaatcaacctatatgtccatgagttgtggcacggaaaaagaaaacgtggtacatatacaccatggaatgctatacagtcataaaaaataaagtgaacatgccctttgcagcaacatggattgagctcaaggccattatccagagtgaattaagtcaggaacagaaaaccaaataccacatgttctctcttaaaagtgaggagttacacattgaccacatgaacacgaagaagggaacaatagacaccaggccttctctgaatgtggagggtgggaggcatgtgaagatcaaaaagtacttgctcattcctgggatgataaaataatttgtacaccaagcagctgcaacacacaatttaactatgtaacaaacctgaatgtgttcttcctgacctaaaataaaatgtggaaaataaaaaggaaacccaagaaatcaggaaattgaatcagtcatcaaaagcctccataaatgaaaagcctaggactcagatggtttaataggtgaattatagaataattaatatcagttatactctttaaaataatagaagaggtaatactttaaactcaccttatcaggctgtcattaccctgataacaaagccagacaaataagccacaaaaacctacaggccaatattcctgagaaatataaatacaaagattctcaacaccataaagtcaaactgaatttaatagcacattgaaagggtcacaacccatgaccaatatgatttatccccagggtgcagggatgttttgacatacaaaaattaatcaatgtggtacacacatgaatagataaaaaaaggaaaacacatagaaatataaaatgcatttaataacattcagtgttaattcatgataaaaactctctctatatatataataatatattatatatatatgtgtgtgtttctatatgtgttgaggaaggcccacagctcatatcatagtcaatgaataaaaactgaaaacttttctgctaagatcagtaacaaggcaaagatgctcagtatcatcatttctattaaacttagtactataagtcctagcaagagtaactagaccagaagaagaaacaaaatgcatctaaatcagaaaaaaagagttaaattacagctctttgcagacaacatgttcaggtatgtagacaatccttatgctacaacaaaacgacttttagaactaagaaaaaacttcaggaaatttgcaagtttcaaagtcaaaatacaaaaatcaattgtgagtctacatacaaacaaaatatcagaaaatgaaattaagcaaacaattttattcacaatggtaacaacaataaatgaacatgcttaaaatattttaaccacactagggcaatatttgtatcctggaaattataacaaattgaggaaagacattaaagaggataaagataaatggaaaaatgtttcatactcatagattagaaaacttaataggtaaaatatttctatccaaagcaatctacagattcaatacaatccctattataattccaatggcattgataacacaaagaaagagaaaacaaatttgaaaattcatatggaaccacaaaagacaacaaattgccaaagaaatcttgaaaaaaataaaagccagaagcatcatgatcagactttttgcttttaaaatatatgacaaagctacagtaatcaaaacagaatagtactggcatacaaacagacataaataaatgaaacataacagagcacacagaaataaatccatgcttccacagtcaactgatctttgacaaggatgacaaaaacacaatgagaaagcataggatctttgataaaagatgctgggaaaaccagctatccataagcagaagaattaaattaggcccttttctcactccgtatacaaaaatcaactcaaaatgaattacagacttaaacataagacccataaccataaaactactggaagaaaacacagggatatagaagaaacactattgatattgttctaggctacacttttattttgttttgcccctaaaagcaaacgcaagaaaagaaaaaaaaaggtgagtagaaatgcatcaaactaaaaagtcttctgcacaacaaaggaagccatcaacagagtgaaaaaacaatatacagaatgagagaaaatatttgcaaagcctatatctgataggtggtttatattccaactttgtcagtaattcaaacccaaaaccataaaaatgctagaagaaaacctagccagtaccattcaggacataagtgtgctcaaagacttcatgactaaaacgccaaaaccaattgcaacaaaagccaaaatcgacaaataggatctaattaaactaaagagcttctgcacagcaaaagaaactaccatcagagtgaacaggcaacctacagaatggcagacaatttttgcaatctacccatctcacagagggctaatatccaaaatctacaaggaaattaaacaaatttacaagaaaaatacaaacatccccatcaaaattgggcaaaggatatgaacagacacttctcaaaagaagacatttatgcagtcaacagacacaggaaaaatgctcatcattactggtcatcagagaaatggaaatcaaaaccacaatgagataccatctcatgccagttagaatggtatcattaaaaagtcaggaaacaacagatgctggagaggatgtggagaaataggaacacttttacagtgttggtgggattgaaaattagttcaaccattgtggaagacagtgtggcgattctcaagaatctagaactagaaataccatttgatccagcgatcttattactgggtatatacccaaaggattataaatcattctactataaagacacattcacatgtatgtttattgctgcactattcacaatagcaaagacttggaaccaacccaaatgtccatcaatgatagactggattaagaaaatgtggcacatatataccatggaatactctgcagccataaaaaaggatgagttcatgtccttttgcagggacatggatgaagctagaaaccatcatttgcagcaaactatcacaaggacagaaaaccacacaccgcatgttctcactcataggtggaaattgaaccatgagaacacttggacacagggcggggaacaccacacaccggggcttgtcatggagtggggggctggggtagggatagcattaggataaatacctaatgtaaatgatgcgttgatgggcatagcaaaccaacatggcacatgtatacctatgtaacaaacctgcaccttgtgcacatgtactctggaacttaaagtataataattaaaaacaaacctggcaccgacaaaacaaaaaaagaaaacttctgactgatatactcaatgaacatagatgcaaaaattcttacaaaatagtagctaacagaatccagcagcacattcaaaagataatctaccacaatcaagtaagctgtatccctgggatgcaaggttggttcaacatacacatatttcatgttcataaattagaagaattaatattgttaaatgttcatacttaccaagctgatctacagattctaagcaatctatttcaaaattccaatgtaatttttcacagaattaaaaaaaatcctaaaatttttatgggaatacaaaagaccttgactaattgaagcactttgagccaaacaaacaaagaaacaaaaaaatacagagacaaagctggaagcatcacactgcctaactttaaaatatattaccattacaaaaaacagtatggagtttcctcaaaaaattaaaatagaactataatgttatctagcaattcctctatatgggtgaaatccaaagaaaataaaatcagtatgtcaaagaaatttgtggaagacagtgtggcaattcctcaaggatctagaacctgaaataccattagacccagcaatcccattactgggtatatacccaaaggattataaatcattccactataaagacacatgcacacatatctttattgcagcactatttatttacaatagcaaacacttggaaccaacccaaatacccatcactgatagactggataaagaaaatgtggcacatatacaccatggaatactatgcagtcaggaaaaagcatgagttcatgtcctttgcagggacatggatgaagctggaaagcatcattctcagcaaactaacacaggaacagaaaactaaacaccgcatgttctcactcacatgtgggagttgaacaagaagaacacatagacacagggtggggaacattacacatcagggcctgtcggagggtggggggcaaggggagggagagcattaggacaaatacctaaagcatgcagggcttaaaacctagatgacaggttgataggtgcagcaaaccaccatgacatatgtatagctatgtaacaaaactgcacattctgcacatgtatcccagaacttaaagtaaaatttaaaaataaataaataaaagaaagatggaaaaaagtaaaaactaaaaaaaaaaaaaaaaaaaaagtataggaccttgaaaataaagccttgtctacaaactcttgtgaacttaaaaaaaaaacaaaaaggaaaacagtttgaatagacatttctcaaaagatatacaaatgatgaacaggtatattttaaaatgttcattaatcatcaatgaaatgcaaattaaaaccacaatgagacactagctcatacctgttagaattgctattatcaaaaatacaaaagacaagtcttgtcaaggatgtggagagaacccttgtacactgctggtgagaatgtaaattagcacaatcattagggaaactagtatggaagtttctaaagaaattaaaaatataactaccatatgacccagcattcctgtttctgagtatatatccaaaggatatgcaatcagtatgttcaagatatatttgcacccaaatgttcattgcagcattattcacaatagccaagacatagaaacattcttaatgccaatcaatagatgaattgataaagaaaagacagtcaagtgatctttgacaaggatgacaaaaacacaatgaggaaagcataggaccttcgataaaagatgctcggaaaaccaactatccatagcagaagaattaaattagacccttttctcactccctatacaaaaatcaactcaaaatgaattacggacttaacagacttaaacataagacccataaccataagacccataaaaatagtatttatttaatataagatgaaatattttcagacacaaaaacaggaaaatcctgctgtttgcaacagagcaacatagatgaacctggagaagatcctgctaagtgaaataagccaggcacagaaagacaaatacttcattatctcatttatatggggaacttgagaaagtcaaactccaaaaggaagaaaatagaatggtgtttgccaggaccttggggaagagggaaatgagatgttggtcaaaacaaacaaagttttagtgatgcaaaatgagtaggttctggaaatctaatatacatcagtttgattataattaaaaatgttttttaggtacatctgaagtgcccttactacaaaaaaatggtaatcatatgatataatcaatatcttaattagctttattataatgattattttacaatgtatacaatatgaaaacaattttaatttgtcaattatatacatgattttaatttgccgattatatctgaaaactgaaaacaatgtcaaaaataaacttgaacctaagatactgtgggaaaaaagtctgtaaagtaattgaaatgtcaaataatgcaaagctgacattgacaaagactggagacctctaaatacctggggatatataatcctgaagtgccctgcacactcggggactagttcagagaggtttaggattacagtcactaaagtacctcatatcgttcaggacagccccatcatcaaaaagaagattagatgtccttcaggatttcaggacaatgctccagcttttagaaatatttgtttaaaaaataaaaataaaattacagatacaccaaaagaaggaaaaaatccaggaaaacgttcgtagtgtattaaccctattgtaaaacaaaataattcatttaaaatcttacagaaaactgaactgaaagaagaaaacattaaatgatattatgaatcagaaactaagttaaaattcatttgaacaactgtgtatgtacaagtcctcagttcacaactcttcagacagtttcattactctacagagctggatggaaatttgtgtttctccaggctatgcatctctaagtgagtggccaggagtgaggctgctcccaggctcacaacatcaatggaccacacaacaattagcagcagaaggaagtagtctttacaatatatatacattaagtatactacgagcagggttttcactttagctaaagcctttctgtggggaaaatggactctggaggccttctctcttccctttccaacagcaaaaaataaaataaaagaagttgttcacccccaattctgcctcagatataaattaaaatggctaattccatcaggtgggaaaagacagggtgacttcccacatcagggaaccaccatttagaattcggagctctatcctttcattatattactcatatttatttcctgtgggtttagagaaacaagaattagaaataaatggcattcttgcctgctcacaagggatatttgcctcaatctaaactcctgcttcaactttacacagttcctaagtctccaatgctgaatttgtgactcttatgtcagaaatcttcaaagttgtggcagatccagaaacaaagagatagagaaatcattcacgttgggatgacaaagagagcaagattaaacacatagggaaagagtaattccagaagggaaacattaggaaaagacagtgtcctataaagacgattttaccttctttgaaccactgacagctctctgataaaataaaaaggactcagtacagaatcagagtcagccagctctgaacagagtattgccactctgagtaatatgctctacattggaaaagtaaaaaaactcatcggtatttcagttttgtcataccaacagagggagcattccaaagctttgacttctgttattattaagggactgagcatgcaaattagcactggtacacaggcccttagttgaatcatacttataccaagtgccatgggaaggtgtactgcaaaatatcaggagtatgtttaaataaacctagttttgctcaagccttgttatggatagcttcatgcagaaattgtgcatataatatctatgctctggagaaatttcagattctaaagaaattcacccaaactctccatcctccctcctacttggctccaaaccctaagtattattaacccacattctcttgaacatctccttttctactctttatatcactggatattttttatttagcaagtcttagagaatgttttcaaagaattttggattacagatgttttgtatactttccaaggtgctctataacttactcacttaccttaccctttctctattactaaaacaatgcatctcaatccttactgcacatgaaaaccacctggaaatcttaagaagaaaaaataatgctttggacatattcaacaccaactgaatctgtaaggataaggctttgacatcataaaaacttccagggtaacactgatattcatctgtgctaagaaccctatagtaaaagtttaaagtcagaggaaaagcaacatagaacagctgacatttcaaagttcaaaaggatggttttctgttatccagtgttatcatcacagatgacactgcaaacattttgaacagagtttcatatggcaaactaagcagtatataagcaaggcactcaacaccagggctctaatccctgaatcactctgtgagattacaaaccatacttttatcttcttgcagatccccgccccaaaaagcactttggaggatgaagcttcaaaacagaaataatcaaaatactgtggcaggaaatctgatcggaaacattcagcacaaggagaaaaatatcagacggcattcattaaactccccaaagccctgagaaacactgatttaagaactaaaaatatatcatcagttataatagcagtatgacttctaacctgaaagaacatattgtagtcaatatgatgtttgcaggcaggcagagtgtctggtgcttttggtaagaatatatattttgtctacaaagacatcaaagtgcttgtgagcaggaatttgtcttgtgaaagtttacttccaactctcaagcattatatccaatgacttactaatgaatagcattcctatcattggatgaaataattaaaatacaaaccagctccttcaccttacagatttaaaaaaaagtttgtttgattgtattgttaaaacaaagagtttgatttcagattgactttcccaaggcctcatattgagagaaagttggggataaagcaagcacaaacaatcatcaacctcaatggggctgcggcatttcagttcaatcttgttttctgttcttgaaaatttggggagtcaccctccacaataactatatcaaaacttaggccctttacccacataaataatacccaagtctgcacctcttacttcatagcttctgattattcatagatgtttcaggtgagagtaaaactgcattgatttctttgcattcagggctgatctattcaaatcattcactcttttagggcccaagtgaattctaatatgcagcaggaatgagttccattgtaacaaaagcttaatgatcagctggcatggtaaagtaccagttatgctgggttctctttttctgacttcatcattacagataacattctggaaatgttgaacagagtctcatataacaacttaatcaggtgaacttgctgaataattactgtttcatggaaatacattatatttattcaataggtagaaaaagttcaatgtaattgtatacgggcatgtcttggggctccgaccccatggcagtatctaagggtgaatgtttacagctgaagccccagtaggcgtgtgttatagtgtgctctttttgtttagccatcagcaggcagctatgttagctgaattagaccccatgccttattgcaaggacagagggctttctgtgtcctgaggtttcttgccttggtgtactggaagaatcagatcacaggtggcattggagaattagtgcaaggttttattgagtggaagtagctctcagcagacaggggagtcagaagggagatggagtgggaaggtggttttctcctggcgtcgggaagctcagtgacagggctctcctcccaccacctccggccaaactccatgtggttccaccagtcaatggcctgccagtgcctgtcagtgtgctcttctgctggtgtgttcctcttgacgttcagccacttgtgtctgtgtctgctagggtctcggggtttttataggcacaggatgggggcatagcaggccagggtggtcttggaaaatgcaacatttggcaggaaggcaggagtgcctgtcctcacctaggtccatggtcaacaggcccaggagtgcagcccttgccagggacctgcccttctcctcccagcacttctctggccacctcccatatcagtaagctttcttttcctatacattttgctcttgctagattttatatattcttattttatttttgtctgagtttttatgtaaagattaatatttttctaaatctttaaatagtatattccaaacacatattagcattattttccaaatattcaaataaaatttaaattattaggaaataatttggagagtactccaaatattcaaatacatctggaaatttctcatatccatgtttacatacgtacatttttgttccccacctttctgggtatcttagagatacccagaccccatagtggcctatacttttgctccaatttaaagggctgttctctaggtcatggctacacaaatgcataccatggattatttttattaccaaacacacttttctcttgacagcttttctgtgtgatgccacctatttcttagaccccgtgtttggctctttcttagtttattccttcacttttttatagtatgttttaattaagggtgtatgggaggcaaaatttttgagtccactaatattcaaagtgtctttgttccctttatataatgtattgacaatatattcagtcaagaattataatttagaaatttctgtccttctgaatttcgaagcaattgttccattgtcccttaggtcccagtgtttctgttcagaagtgtaatgtcattctgagcttttgcctgttttgtctttttctggaatctgttagtaccttacccaggtgtagtgaaattttactctcatatgcattattgtgagtcttttacttttcttcatttattgtactggaccctctatgaaaccataaatataaagattcctatccttcagttctggaatatactaattttcagagaatatgcactttttatattctatagtccttgttaactggatttcttcattttcatgtattctatctcccagttttcattttttttcacatttgctgttctaattcatcagagatactctaagagttttactagaaatgttaagcctcatttataagatcaatgatttcagaaaacctttctgtttcttgtttctttcttcaataatgttcttacattatgagtgcaatatattctcatctctctgtgtgattctttcttttaatatctataatttattgaatatttactatatgctaaataccatactaggcaaattatatacatcatcaagtttaatttttacaatcatattttatggtagaaaatattattaccattcgatatacaaagatatcaagaataggtttttcatttacagattaattctcattatgtaaatactgtgtactgttttgccaagtagtatataatgattaatattttatttcctatacaactttttgttgataaatatcaatggcatattagtttgactgcaaagtccaaactccaaagagagttataggagactactgagagtggaagtgctacttcatgacaatatttatacaattttgttatttataattttatattattatattttcacattgttattatttttcagattttttagaaagtaatcttcttgaggaaaagtaattttttaaaactttcttcctaacccagcccccacctcagtgcctggaaaattagttgtaaaatagtgcctataaaatttttcagtgcaaacaattgctgctcatttatatttatttatttatttatttatttattcatttatttttcaagttagggtctcactctgtcactcagtatgtagtgtggtggcatgatcatagttcactgtaacctggaattcctaggcttaagcaatcatcctaccaaccaaatagctaggactacaggcatgtgacatgatgtccaactaatttatttaaactaatttttatatgcagatatcagcattcatacattaaagtttttaaagtagaacttacctgtaggcaaggtaatatttctttaagttttcatatccataaggaagagataataatatatgcttcatagaattgttgtagaattaacatatatacattttatatatagtgcttagcatactgtttaaaacctatataaccattaaacacttactaactattcacagctatttctattattctcccctttattaccttcattatgtgagatataagaataacatattcttgatgataggactagattaagatgaaatccagaaaatacaaaggaagtttaataatgtaataaaatgcattaaaatgtcatcattttaagtattgttctgcctcttaacaacatagcacatgttgacagatttaatttgaaaatcaatctagagcagtatttgaggctcctgaataaatatctcttcaaacattataatattcaagttttcaggtatttcctattaggaaattcatttattacatatagcatattaaattttatttcttgaagcaaaccttcggctattatctccaatctaaattaatttctcattcccctatgagcctttagcattttatcaagtgtttattaaaatgcctatcataattttcttttcatttatttattaatatgtatcttacctcctcactagatccaaagcttcttgcagaaaagatcaataacatatatatctttgtatttctcccagcaactaaaacaatatcttagtcatggtggaaactgaaaaaaactttgtggaagtgaatgtacctgataattataaaattaagattagatttatgtagcacagctatatggaagcaatgtagtaaaacctatttacctgagactctaaaagattactcaagccagaattatttgagacttggtattactcaaacttaacatatctgtgacttttacatgcaggaagatgctactgtgaaacacattatgtgcttttcactgggtcttaattggttcttaggggtttgtatttatcaatcttaacacatttttatgttgctctaatacacagcaacatacacctttagcatgcattctactaagattatataatacaataaaattagttaacacataattggatcaaatttgagatttaatttataagtagtgtgatccactagctatgtacctagctaaaagctaaaagtatttcaatacttattaatattatatctaatctcttctagagtcatataatgtttattttattgttcttttaagtcaaagtgacatgcaagaaaaaaattaacattagatatcatgaataagatggtggtgctaagtgaaatcaagtgaaaaaatattttttaatttaaatgtatttaaaaattggaggcccagatatgttcagtggtgtattctagcaaacatttaagaaaaaaataccaattctctacaatctcttccagaagataaatactttgtaactcattctgaatccagaattgtcctaatatcaacaccagatgaatacattacaggaaaagaaaaatataggcaataaatctaataaatatagacgtaaaaaccctcaacaaaattttagcaaaccaaatccaacaatgtacacaaataataatatattctgaccaagtgggatctcttctgaatatgaatatgcaaagttggtcctacattagaaacttaatgtattctattgaataaacgggttaaggaagataaatcacgtgaccatataaacagatgtagactgaacatttgaagaaaatccaacatttatttgtgataaaagctatcagcacactaggaatagaggagtatttttataacttgataaagaatatctacaaaaaacctacagctaacatcatacttattgatgagaaactggaggctttccttctaggattagaaataaggcaagaatgttcactcttagcaacatatttttaatattgtactaaaagtcctagctcgtgcaataagacaagagaataaaaagttatacagattggaaaggaagaaacaaaactgtcatgttcaaatttagcatggttattgatgtagcaaatgaaaaataactgacaaaaaagtcttgaaattgaaaagcaattatagtaagatttcagaatataatgttaacatataaaagtctattatttttctatataccatcgataaacaaataaaatttgaaactaaaacaaaataccatttacagtagtatctaaaaaataaaatacttaggtacaaatctaacaaaatacaaatctatatgagggaaatgataaaattcataaaatgaatcaaaaagaagcaaatgaatggagagatattctatgttcatagataggaagactcaaatttgtcaacatgtcagtttttatcaacttgatctacagattaaacgctatcccaattataatctccacaagttatatgaagaggcagaagacacagaatagccaacctaatactgaaggagatgaatcaagttggagtactgacactatctgacttcaagagttcccgtaaagatatagtaatcaagacgattttgtactggtaaaaaaaaaatagacaaatggatacatggaaaagatcagagagcatagaaatagacctacataaatatactcaactaatctttgatttaagttcaaatgcaatatgtggaatacaagatagttctttcaacaaaaggtgctcgaacaactggacatgtatatgcaaaaaacaatctggacacagactgtgtacctttcacaaaaattaactcaaaatgaataatagacttatatataaaatgctgatctatgaaactccataaggtaacaggagaaaattggtttggccttggatatggtgatgactttttacatacaacaccaaagcacaatacatgaaagaaataattgataatacggtcttcattacaattagaaacttctgctctggaaaagacactgtcaaaaaataagacaagtcataaactggaagaaaatatttagaaaagacatatctgataaaggattgttatataaaatatacaaagaatccttaaaactgaacaataagaaatttaacaaccttatttaaaaatagacaaaagacctgaacaggtgcctcatgaaagaaaaatatagagatggtaaataagcatatgaaaatatgttcaacatcatatgtctttagataattgaaaattaaagcaacaatgacatactactacacacctaatacaacagcccaaatctaaaacactgacaacaacaaatactggcaagaatgtggagcaacatgaagcttcattcattactagtgggaatgcaaaatggtattgtcacgtttgaaaagcatttggcagtttcttacaaagctaaactcttattatgtgatccagcattcaagcccttggtatctatccaaaaacgctgaaaacatatgtccacacaaaaacctgcatatgaatgtttgtggcagctttttcataattgccaacatttggaatcagccaagatgtctttcagtaggtgaacaaacaaactgtggataagtaaatagataagtacatccagacaacaaaatattattcagggctaaaagaaaatgaactattaagccatgaaaatatatgaaggaatatcaaatgcatattactgagtaaaataagttaatccaaaaagacaatatactgtataattccaattatacaacattctggaaaaggcaaaactatggagacagtaaaaatgtcaatagttgtcaggcactggtgatggcaggtatggatgaataggcagaattcgaggatttttagagcagtaaaagtattcagtatgatactataattgtggatatgtcattaaatatttgtcaaaacccacgaaatgtacaagagttatccctaatgtaaactatgggttttgagtgataatgatgtgtcagtataggttcattgattgtaacaaatattccactgttgtgtgggatgttgatagtgaaggaggctatggatattgggggcagaaggcatatgagcagtctctacaaattctgctcaattttgctataaaccaaaaagtacttaataataaaatatattgaaaaaagtttggggaaccaagataaaatccaaaaaatttgatataaagtaaaaacaaaactaaactaaagcacacacatacacagagagagagagagagagaggagagaaagagacatatttaatattgacctttactcactcccagaaatagagcactttaaatagacctgggaaaggaagcctgtgctgccacaaaaacagttttatgtatcattttgttaactttgaaatatgctcctggaccccttagcccaagatataaaatctataggcttgggttaggacttcacttgagatttgtttatagtttttccatatgagcttctgtcactctactaaggtcctatcagccataaattttccagttggaaattcctcttgatttttgaacatgaaaccactgcacgctatgggcaacttgggatttctttttcaatttcctcaagactgaggaatatgtcatactacttagactatagccatgtattaacaatctacagtttctgcttttgatggctgacagctcaactacggaaaatagtattttgaaagctgtgggaattcaatcatcaactattctctcatgggctctcttccaaggtattggacctgattaaaggaaatgttacttttgcaagtatgcattgctatcaagtaaaagacacacacagagagccacaaccaacaacaaaacagcatatagttatgaccgttccttattcgacctcagccatcccacaattctctattttttcaaatttattttcttttattgccaaatgtgtgtgagtgtgtgtgtgtgtgtgtgtgagagagagagagagagagagacagacagagagtgttcaggagttttttgtgctgggaatcatcaggtcaaatatgaagttcagatataatgaagtcactcactatccttttttatagtcagaagacaccagaaataggtcaagagacatttgcttgcagaaaaagatatcagcccaaatctaggaatgtctattgatacaagaaataacagagttattttagatataagaacacaagaggtccagaatcctcaacttagatgtttggaagtcaaaaataataacaccaacaattcagggcttatttcctctcgtttgtatcttgaggaaatagggcagaaggtatggaggtaaaatgtgttaaaactgggagactgcttggcctcagatctgtaggcacatgaaggcagtttttgttctttttgtttttaaggatatgagaataactagtgcttacacacaggagacaagagtcaaactcacattttaaaatcaggaatatgtgagagctccccaactggtaaaagatggctaaaatacaagcgcaaatgatattcaccagccgacatgatagcttatattatataaagctgttttctgaggagacaacaggaagaaggcttagccccataacctcaccagccacagcctaggctcagctgcatgatggctccatgactggattcacaatgttttcattctatctgtcaatgaggtacctgagctgactctatgagacccagtgttattatagcaaccttgatggctcgtgtaaaggttacttcataaccaaccgaaagagaaatatgagtgtaaaggtagcacaatacagagagagagagagaaagaggagcaaaatcccatttaagatgatcctgcaaatcagaacttaataaaaaagcgagaaacaatcatattcaaaaggcagctgacaaaaataactttctaaaataattttaaagaaaagaatattaaatttattgaaggcatatatgaaggaatagcattaataaaaataataaagaatactgataaataagcaaacaaaattaaaaaaatgatttataagcagaaactattagaagtcactgagactgaaaagcagtactgagcaattcacccagaatgcaaccagaatacttcaaaagataagttgttcaaagctatagagaattcaatagcagcctccaatatttattcactaggcattctgtaagaagagactagagagaatggaagagaagtaatttagaagtgaaaatgacttagaattttccagaacataagaaagacaatagtcaacagattaaaacaggcatgttttactgagtgccaagtagacaagtcaaaatagatttataactatacacattgtagtaaaatctacaaaacattaaggttaaagacaaaatctgaaaaactagcaagtaaaaagacaaattacatatatattgatgacaaataggagacttctcattaacaacagtataagcaagaagagaatagattagtagcttcagaatgttgattgaaaataaccatcattatagcttatatagtcaacctatcagtcaagacttaggagcaagtaaggaaaaaaatcaattagacctgtaaaattaaatgggagtttatcacccatagactttcttgaaataaataccaaaggaggtgcttccacattaagaaaagtcagcagtacagaagtctggtgcaaacaaaaagatagtgcaattaaaaaaatgctgaaatgtatttgtaaattaaattcaatattgtctgtaaaataataatcaatttttcacttaaagcatttagaaaagagcaggaggtacagaaaattctactcaaaaaaagcaaaaaaaagtagaaaaaatcaatttatataaacatattaacagcaataaatgataactgagaaagtttgtggcaatacagcctcttagattggacttttaaaattctagctacatgcagcttgcaggagttacttcttggacacacatttataggattcttaaacaaaaataggaagtatagacaggatagcaaaagtaaataaaattaaaccacaaaatatattacaatattaaatcagacaaatagaattttaagaaaaagacatcagcagttacaaagggtaatattacaattaagaataattcaacaaatgtggattaaaacagttgctgtactaatggtgtagcctaggcaactagccaacattagacagacttcatctggaattatagctcaaataccttcaagacttcatcatcagaagactactggtggtaatctcttccttatctttctcctcctatttcacatgcctcaatacctgaaatcttatttttttttttcggaaagtataggttcttccatgttgaatattcccattataaatatttaaacacctcagcataataggttaagtgaacgatggtactaagatattaaatggctaaaaatgcaatcttcaactgtaaggtttggctcagagaagtgcttcatgaaagaacagcagaaatacttttggaaaagaaaagagaaagtgattcttttatatctctttttatgatgataatttttgatggaaaagccatattatcagtaaggaatttctaatgagaagaaggatattggatctctctacatctttctacatttctttctgctgttcatagaatcttcaaacatagaataaaatttggattaaaaaataataaactgccaagaacatatcagacaagagctacttaatttctttttgctaacaatatatttttctgtttaaaattcccaaatgaacactaaatatagcattattgctaagaacagcaaaaaacgtttcagtttattctacctcactaaaatgcgatttcgatgtaaatataacttatattttcaaatattaacttcaaccgcactcacagaccttttgttctcgggggatacgtgctgcagagatacagttcaagagcacacggatagtcaaacctggtataccagttgctagaagacctacaactctacattccacaacagagaaaacacacacatcataatgtgacccaagcatatctgccttcaattatcagaattgatgtggcttctaataaacacagatgttctccaacaaattgatcttttgtcttagactgtactgtgtttctccattcaaagctgattttattccttctgtcagtctttgccctgttcttcatttccactggtgctatataggttttcatttttctctgcctctcaattggtctttcttgtactccctctctgccccaatgtctcatttgcagtatagacagagtagtatttctaatctgtaaaagtgactatattgctgctttaaagtataattagatgcataaaatacaatgtgcagaaaaaaaaaaaagagtaaagtcaaagttccttgacatggtatgaaaagtctcaatggtgtaacatttccatatgcctgtcaagtttcttctaccgtccctaccctaaatgtgtgacatataaccagacctatttgctaacatttctctgaatacatcagtgacttttacttgtctgtctttgagaactctctttccaaagctgaggatcttttaaccattttcaacttactgtaactcttctaaggaatcttcttgtgaatggtcatggcccttaacaagaggaattaactgtaacctacaatgctattccataacactatgctcattcctgttttgtagcatcccattattaaacaggtcagctggatgaaaaatgcagaactacgtgccaagataaaatgtaatgatcagagctgggcaacttgatacagtgcaaatacaattaaatgtagatttttcagtgaatatgtttccccaggatatggagacaagattgcttaagtttttcttcctgttttagcttggtgctggtcatgaagatttggcaggttgtagaatacattcatgagtgaggaagaggacttagaagctcagaaccaaggagggctccatttagatctacacaccagagcgtatattaaatatgacactagataattgagctgaatttaacctgtcagttacatctactgtgacccctgaacaatttacgtattttctctgagccttatttttataactataatacaaagttagcaatagttcttatttcatagcttattgtgaatattcaatagatagctttaattttagataatttttaataattatataattttatataattctctaatatataataattttatataattctccaataattatataataattttatataattctccaataattatataattttatataattctccaataattatataataattttatataattctccaataattatataataattttatataattctccaataattatataataattttatataattctccaataattctataataattttatataattctccaataattatataataattttatataattctccaataattatataataattttatataattctccaataattatataataattttatataattctccaataattatataataattttatataattctccaataattatataataattattatttgttatttaatgctgtcttgactgaatttgtggccttggctagaggctggttagttccccttcttaagcaactgattaaatttggttgcactttctttgttgggttcttgcattctggggccactacgcaccgagcctaactatcctgagaccaggtaccacaggatagaccctatgacctggagcttgtgaaatcacttattattcattttacgggaatcttgggaaacctagctaacttctcctcacttggcatacatgaattgcctctcacaataacaacttgctcttatcccaaccttgagtgctatcgcctgtgtgacccttgacaacagccttctcttgtttggaacacagagtaacaaaggtttctgcttctcaactatttgagtgtcagagtgttgtgtttcaccaccaaaagaatttttaaattttataaaataataaatacatgctgaaaaccatgaacaaagttgattttcatcttcacaaatggaagaaatatggttgtaactagtccacatgtttttcttctatgtattcaatagcaaggccaactgagaggtaaccgagactggttgtagtatactttaaaccctctgacatcgtattgaaatctttgccactagaccagtagatcatagaaatatctactccatcatctagattttctcaaggggtactttgctagtattgttcgtgtagtttaagaaataatagaaatatcaggcacagaaattgacaagatatattttatttacagaaattgagatgatgaatgatactttatttctcatgcttatgcaattccatatttcatactaaaacatgcgtaagtttcattagaaaaacattaggagatcagaacaaaacccactgccacaacagttactttaaaattagaccatcaaccattattttctcattgggaaaatgatcactaccttggaaacagttttggtagaatatttgctataaaatgcctcccagaatgttatttacatcacacatgtggatatatcttcattactatttactctgtgatgttaattttctttagaataaaaaataaaagagtaaacctatattcatgcttattggcatcaccagtgaccatttacatttatttagatctctttttttgttcaacattctgatgctaactttaacaataagtataaactgttaattgaacatttctactatcagacaatataggaatttagatctgtgtaatagaacatagactgttaattattataacatagtccttcagtatgttttatgaagcatttttaatgacatatcccatatctgatatttatccccatcttcattctcttcgatgttaaaggaaatagctctgtaaaaatctaccctttgctgtctactctgaaattcactctaccttgcctccaagccattgcatttataatgttctacacattttttatttcctttatccatacagttgcattgtttatttttccccctttcttctcctgaacaagtacttctcttaaagctaagttcttcattttgtactttaatgtctactatttctttcttatgtgactgacctttgttaaggctgagcctgtgtcaggcttcacctccatgctgattaccattttctgaatggacccttttattttatgatcccattatcacttcacactcagcaataactaatggaatgctgttctcaaatccttgcatttccctgaattcggtcagcattatatttctaaaacacagattttgccttatattcctttgattataccttttcactgcctatatggtccaaaatccattgtatgcagaaaatggaagtattttcatggtctgattaaagtcaaacatgttcattatttctccaaatactttcttaaaatacacgtatgaaattgtgcactttttgtctatttcttcttgtctttaaaaatcctctaagcattcttcatctgtgaagacttcctttccccaagacattatattaagaacttttattttggtacacagttatctaatacttgcctgtattttaacatatgtcacattatatttcagttaatattgtgcatgtctttccttctacagagaattatttttgagagtggtgctgataacctttccaaatatttaaccgtttccccaccacctagcagagctctttgtccataataggtactagctaaatttttactgaatgaatgaatataatttgaaagtataatactatattgatgacattggggatgaggaaatagaacaagttgttcctgagaatagattacctgcattcaattcccttgatcctgaaactctcaatttttactacagagcaactcacttgataggttcaagatagttatatactttcctgtgtgacaggtactaagttttcacagtggttgaattctcccttcgacttggatcctgaaattttctgacaaagcagtatcaaactacagctaaaatgtagccatacagatttttaaaccatcactgaattttccattaagattcaactacagtacatgatcttttaaagagtgacaaagactatatttctcagttacataactagggcttatcacactgaaaaacaattgaaaccattcaaatagtttccctatcacttctgggtagaagaattattttcacctcagctgttttgtattggctatatgtgcagaatcaacacgttgaagaccaagtttaatttgttcattctcaggagaagcataaaggctatatattgagagattggattcacgagtatactccaatcaaagatagtttggttttatattttatgcataagtataacaccatgctatatattcagcaaagacatattactttttctgtcacatgcagggatataaaacacaaaaaatacttactccagcaatgatgtctttcagttctctctgaaaggtagcatatgtatgaattcacgaacagattgcaagttaaaaatcttacattctgtcattttcagtgtcaaatgcatccaatgccaaacacatcaaagatagtcaaatcattatgaaattattggtaaggctctctgttgcttttctatcggtaccataacaaattatcacaatcttagtggcttaaaacaagattcatttgttacctcatatttccattggttagaagtctaagtacagttggaacctctgtgcaacgtcttgcagaactaaatcaaggtgttggatgggctggccccctttctggaggtcgtagggaagactctgttttcatgaccactcaggttattgaaaaaatccaattgcttgaaattgtgggaatgaagctcctttcattttcaagcaaacaaacatagggataaaatttgaatctctatccttcaaatgtccaatttcccttatgctaccagccaagaaaaatcttttaaggactcatgtttatattaagcccatatgaataatccaggataatatttgaatttttaaagtcaagtaattagttaattatatctgcaaagtacccttttctgtgtattcacgggagtaacaccaggaggtcaagattatgggtgccagaattcttcttacaacaggctcttaacttgaaatgagtataagaaattatattgagcataaaattctccttccattattttaaaaaagtattgccctagtagtgagttgataccaacaatcaagctaaatgaagcttaaatgtactgagatttctccttagctcatttcttcaccctctaacctccagcaaaacatctctaatctcataaagaatgaaaatggggatactgggttggatattttaaaaaattaaccttacatatagttgttaaaatatcatccacagcctctgttgaatcactgggttttagaagtaattattcccacttgataatgacttcatgcaatatttttaatataaattaattttaaaagccttggctttatacggttagaaaaatatagtaagagctctgaaatttctctctatccaagtatatttaaacttacgcaaataacccataagaacagtaagcatgctttgctcaagtgaaaataagataaccagaatttgattgtgataagaaacagaaaatatttattattataacttaaattgatactgtaatttagtatgttaaagatcctttgtcatataccatattaaaggctgaaataagtgaaacatatagaaatcattttctttttcctcaaatagcattatttccttcatcttatttatttttctatttaagccaacatcaatataacttaaatattaagttaggtgaaatttgtttcttcattctctgaaattcacaagtgttaactcaaattgttaaacatatgtgtcagtgtatgttgaacactttgtaaggttgatgagtgtttctgacacacaacattttcaatgcctttttctatactaattaaagtaataaaatttagattcagagaggggtagactttggattttagtaccgaggcctaaatgtgtatcattgtaagactctactttgcatccagttttggagtctaggaagtctattggattttgccattagaaggtaatcagaggagggttgaaggggtaaaagaagaaaaaaaagatataaaaatattaggactactgaagtgtacatttttaaatggtaaggatggtaaattatatatgtatattttatctcagtaaaaattaatgaaaaaataataactagagggtaaaattagagagtaggtaatcaataagggtgaaagccacattgtaattgcacattttgggttttgcctaggtagaagctggagaaatggaaatatcaagtgacctcttacaagaaatttagcagccatacaataaaatgtaaggtgatagttgaggaggaaaggaagggcacagaaatgattcttgttttgttgtgtgttactttgaagcataaaggtcacctgagaatattttgggcaagaaaacaatcaatagaaagaaaaagaatttctacagaaaagccaataatggagcaaaggttttctgttaaaaaaaaaaaaaaaagagaataaaccaaggaacttaagtgaagcagtttcctttagcaaagataaaggatgttgtctccacaaaagaaaatgagaaaatggggtttcttattgtgaatctgagaagaattaatttgattggtagaacactggacaaactaccatttagatgaagttaagatataagagaagatatggaaactgtgtcttttgcagtttatagtggccaactaatggtgacaattcccatatgtgagtagaaaaagattgatgagtgtattagttacaagttcaggactacagtcagactgggtatatattctagctctaccatttaaactctattgaggtcaatttcacataacataaaaaacacttatttaaagtgttttatgttttataagtatactcatttagttgtgcaaatgtcacaaaaatctgattttagaaaactgtcgataccccaaaaccattatcagtcattgcttttctccccagtctctcttcctggccccaggccaaagtaattgctaatctgctttcagtctttacaggcttacctattcaaaacattttatataaaagcaatcatgcaatttatagtcttttatgatggcttctttcatgtagcatagtggtttccaggtttttgtgttttttaatttgtatacatttaaggaggttttgttacatcgatatattttgtagtggtgaagtctgagcttttagtataaccatcccctaaatattgtactttggagccacaaagtaatttctcatccatcatctccttccaccctttgggatctccaatgactattatatcacactctatgtccatatgttcacattatttagcttcatcttgtaagtcagagcatgtggtatttgactttctgtttctgagatgtttcacttaatatattagcctccagattcatccatgttattgcaaaggacattatttcatttttttattgctgagtagtattcccatgtctacacacacacacacacacacacacacacacacacaccacattttctttatccagtcacccactgatggatacttaggtcgatttcttaactttgctattgtgaacagtgttgcaataaacatacaagtgcaggtatctttttgatataatgatttctttccctttgggtatacatgcagtagtgggattgttggatcaaatggtagttccatatttcagtttcttgggaaatctccgtgctgttttccataaaggttgtactaatttacattcccaccatcagtgtataagcatttcattttctccacattctcactaacatctgttatttcttgactttttaataatagccattctgactagtgtaaaataatatctcattgtggttttaacttgaatttctctgataattagtgatgttgaggactttttcacatgtttgttgatcatttgtatgtcttatttaaaaaatatctattcatgtcctttgtctactttaatggggttattttgttgttgttgttgttgagttgttcttgtaaattctggatatcagtcccctgtcatatgcagagtttgaaaatatgttttttcccttctggtggttctttgttcactctgttgattatttcttcagtgtgcagatgctttgtaatttaagtaactccaatttgccaatttttgattttgttggttgtgtttttgagttcttagtcataaattatttgcctaggtcaacgtccagaatagttttacctaagttttcttctagtatttttatactttcagatcttacatttaagtatttaattattcctgaactgatttttgtatatgagagataggggtccagtttcattcttccgcatatcgcagtccaattttcccagcaccatttgacgaaaagtatatcctttcccccagtatatggtttttgttgactttaccaaagatcagcaggctggagatatgtggctttgtttttggattctctattttgtttcagtgatctgtgtgtccatttttataccagcacttttataccagtgttgtttactgtagccttgtagtatactttgatgtatggtgatgtgattcctctagctttgttcattttgctcaggattgatttggctattcaggctcttttgttgttttatataaattttaggtttactttttctagttctatgaagagtgatgttgctattttgattaatagcaattgatttctatgatttcttttatatgctttgtagtgtagttctgaagaggaacagagtattgagattcagaagaacattgaaccccaatccaaacaatctaaaaaatccaatataatgatgcaaaagataaaagataaaataggcatttcaagaagaaacatcttgtaaagatatttcaccttggttaaatatattcctaggtttttattgtagttatgataaaagggatttctttcttgatttggttctcagcttgattgttattggtgtatagacatgacatttgattttgtatattgattttgtattctaaaactttactgaatttatttatcaaatctaagttgttttggaagtgtctttagggtttatacatgtataaaatgatatcgtcagcaaaaaagaggtagatgtacttcctcttttctaattaagaagtcctttatttctttctcttgcctaacttctctgcctaggactttcaatactgtgatgactagaagtggtaaaagtgggcattcttgttttggttcagttcttagaggggttcctctcaacttttcatcatttagtatgatgttggatgtgtttgtcatatatgtcatatgcattttattattttgaaatatattttattctatgcctaatatgttgagagtttttatcatgaagggatgttacattttatcgatgttttttctgcctccatgagatgattatgtcatttttgcatttaattctgtttatgagaggaatcatgtttatttatttgcatatattgaaccattcctgtatccctggagtaaaacccactttattgttgttatattatctttttaaggtactgttggattcagtttgctaggattttgttaaggatttttgcatccatgttcatcagggatatcagtctatagttttcctttttattgtatccctctcatctttggtatcggggtgatactgacttcatagaatgagttaggaaggcttcccttctcccaccagcaacacatttgtgcagcccattgtcccaccaccaccaacgtaggcacacacacatagacactaccaggtagaccttgtcaatgcatgagcaccctgccatgccctgctgtcaccctgccgcagtcagtgattcacctccattgacatgtgtggaccctaatgctcctgctggcacatgctcctttgcacaaatcttgctgccactgccctgatgaaccactggccagcacacccaattggaatgttgtggccagaagactgggaacacgttgactcccccagtgtagcatgtttcaagtggcaagaaaacaaatccaggggcgtagtaccaaacccccaggggtctgtggtatgcagcccaagagtgatgagctgagccttggctccctgaagtcttccagaaatgaagggagtttactgaacctacctcataccacaatccaaccctcaagggaatgaaaaaatataaaagcaaaaagcctaatccaaaggacagcaacttcaaagattcaaggaaaatcagccaacatagatgagaaagaaacagggcaaaaactctgacaactcaaaaagtcagcatgccttcttacatacaaatggctgcactattacctcagaaaagtttcttaactaggctgaaatggctgaaatgacagacataaaattctgaatctgaatggaacagaggattgagattcagaagaacattgaaccctaatccaaacaatctaaaaaatccaataaaatgatacaagagataaaagataaaatagccatttcaagaagaaaccaaactgaactgatagagctgaaaagctcactagaagaatttcacaatacaattgcaagtattatcatcagagtaaatcgagctgagaaaagaatcttggagcacaaagactactttttttaagtcaattcagtcagagaaaaacaaagaaaaaaaagaatgaacaaaatgattgagaaacatgggattatgtaacgagaccaaatctaagacttatttgcatccctgagggagaagtagaaaaagcaagcaacttagaaaacatatttgagggtattgtccatgaaaatttcttcatcctcactatagaaaccaacattcaaacttaggaaatgcagataactcctgtgagatactatgcaagacaacaaaccccaagacatagtcatcagattccccaaagtcaacatgaaagaaaaaatattaaagcatctagagagaaagggcaggtcacctaaagaaagatctctgtcaggctaacagcatacttttcaacaaaaaacctagaagccagaagagattggggcttatttgtgacaaaaatttcagaggtttgacctagctcctgctgcttgttgtgaaaaagtcaatcactgacacaacaagtgttgcctgtgaagaagggtttaatcaggtgctgcagctgagatgtggaagaacagtctcacatccgtctccctgactgactaaaattaggggtttatagagcaaagaagaaatacaactatgtgtaggaaaacaggaacaccgagagggagtaaggaagaggaggtggtctacaagaagcagacaatcagttagaaaaataaagataaggagaggtaaggaagcaattgtgatgaataagagacctagtgtctcattgtctggctaagatgatcttgtgagtttcagttctttgataattattgagaagtctgtggatcctttcttgagtaaggaactcagattttaaaaatgtaagttttaagcattaagacaagaagagtcaatttctggttttctaagaaaacacctctatgcagtttcatattcagcagtctgaaaaaagaaatttcaaccaggaatttcatattgagacaaactaaacttcataagtgaaggagaaaatgcttttcagacaatcaaatgctatgggaattcattaccagcagacctgccttataagaggtctgtaagggagtactaaatatggaaacaaaagactggccaccacaaaaacacacttaaatacatagaccatagacactatagagcaacttcgcaatcaagtctgcataataaccagcgggcatcacaaagacaggatcaaatctgcataaaacagtatgtaaatgggctaaatgccccacttaaaaggcaccgagtggcaagttgaattaacaaacaagactctacactatgctgtcttcaagagacccacctgacctgcaatgacatccataggctcaaagtaaagggatgaaaaaatatataccaagcaaatggaaaaaaagcagagattgctattttaattttagacaaaacagactttaatccaacaatgatcaaaaaagacaaagaggggcattacataatggtaaagagaactatgaaaaaataagagttttctatcctaaatacacatatacatacatatatacctgacactagagcatccagattcataaaacaagttcttagagacctgtgaagacacttaaataaccacaaaattatagtgggagaattacacaccccaacttacaatgttagacaggtcatcaaggcagaaaactgacaaaaattcagtacttgaatttgacacttgaccaaacggatctaacagatatctacagaactctccactccaaaacaacaaaagatacattcttctcatctgcacatggcacatacaataaaataaaccatataaaaactaatagaaaattttcagcaaattcataaaaccaaaatcataccaaccaaactctcagtccacagcacaataaatatagaaatcaatattaaaatatttctcaaaattatgcccttatatggaaattaaacaacctgatcctgcgtgactcttggatatataataaaattaaaggagaaatcacaaaattttttgaaactaatgaaaacagagacaacatatcagaatctctggaacagcgttaaaggaaaagtttatagtgctaaatgcatacattgaaaagttagaacgatatcaaattaacaacataacatcaacctagaaaatctagaaaaacaagagtaaattaatatcaaagttagcaaaagaaaaaaattaaccaaaattggagctgaagtgaatgaaattgagaagcaaaaaatacaaaagatctacaaaatcaaaaattacttctttgagaaaagataatttttatagactgctagctagactaacaaagaaaaaagagagatgattcaaataaacacactgataaataacaaaggggacattaccactggccccccaaaatacaaaaaaccctcagagactattatgaacacctctatgcacacaaactagacaacctagaagaaattaataatttcctggaaatacaccacttctaaaggttgaattacaaagaatttgaaaaaatgaaaagacaaataatgtgttctgaaattaatcagtaataaaaagcctaccaaccagaaaaagccctggaaaagatggattcacagccaaactctgccagatgtgtaacgcagatctggtactatttctagtgaaactattccaaaaaagtgaggaggaggtattcctttctatctcattcagtgagcaaacatcattctgatgttaaaaactgtcagagatagggatgtatcattccaagatggccgaataggaacagctccagtctgcagctcccagcgtgatcgacacagaagacgggtgatttctgcatttccaactaagctacctggttcacctcatttggactggttgggcagtgggtgcagcccatggagggtgggccgaagctgggtggggcatcacctcacccgggaagtgcaaggggttgggggatttccctttcctaaccaagggaagccattacagactgtacctggaaaaatgggacactcctgcccaaataccaggctttttccatggtcttagcaaccagaagaccaggaaattctctcctgtgcctgtctcggcagatcccatgcccacagagccttgctcactgctagcgcagcagtatgagattgacctgcgaggctgcaggctggtaggggaagaggcatctgccactgctggggcttgggtaggtaaacaaagtggccaggaagcttgaactgggcagagcccaccacagctcagccaggcctactgcctctatagactctacctctgtgggcagggcatagctaaataaaaggcagcagaaacagctacagacttaaacatccctgtctgacagctctgaagagaaaagtggttctcccagcatgacgtttgagtgttgagaatggacagactgccttttcaagtgggtccctgacccccgtgtaaactaactgggagacatctagtaggggctgacagacacctcatgcaggtggttgcccctctgggatgaagcttccagacaaggatcaggcagcaatatttgctgttctgcaatatttgcggttccgcagcctctgctggtgatacctaggcaaacagggtctggagtggacctccagcaaacaccaacagacctgcagctgaaggacctgactattagaaggaaaactaacaaacagaaaggaatagcatcaacatcaacaaaaaggatatccacaccaaaaccccatcagtaggtcaccaacatcaaagaccgacggtagataaagcaacgaagatggggagaaaccagagcagaaaagctgaaaattataaaaaccagagtgcctcttcttctccaaaggatcacagctcttcgccagcaatggaacaaagctggacggagaatgactttgacgagttgacagaagtatgcttcagaaggtcggtaataacaaacttctccgagctaaaggagcatgttctaacccatcgcaaggaagctaaaaacctcgaaaaaaggttagatgaaaggctaactaaaataaacagtgcagagaagacattaaatgacctgatggagctgaaaaacatggcacgagaacttcgtgacgcatgcacaagcttcagtagccaattcgatcaagtggaagaaagggtatcagtgattaaagatcaaattagtgaaataaagtgagaagacaagtttagagaaaacagagtaaaaagaaactaacaaagcatccaagaaatatgggacaatgtgaaaagaccaaatctacatttgattggtatacctgaaagtgacggggagaatggaaccaagttggaaaacactctgcaggatattatccaggagaacttccccaacatagcaaggcaggccaacattcaaattcaggaaatacagagaacaccacaaagttactactcgagaagagcaaccccaagacacataattgtcactaatcgtcagagaaatacgaattaaaaccacattgagataccatctcacaccagttggaatggctgttgtctaaaaagtcgaaaaataagagatactggcaaggctgctgagagaaggcaatgtttataaacagctggtgggaatggaaattaattcatctattgtggaaagcagttttctgatttctcaaagaacttaacaattgaacattcaatccagctatcccattattgggtatatactctaaagagtataagcctttctcccataaagacacatgcaatcatatgttcattgcagcactattcacaatagtgaagacatggaatcaacataaatgcccatcaaaggtagattggataaagaaaatatggtacatatgcaccatggaatactacacacccataaaaaggaatgtgatcatatccttatcctttacagcaataatgaggaattggaagtcattattccaagtgaaataatgcagggagaaaaaagcaaatactgcatgttctcatttataagtaggagctaaacattgagttcatatggacacaaagaaggaaacaatagataccagggcctacttgaggttggagggtaggacgagcatgagaaacaaagaactatgtactgtactatgcttatcacttgggtgacaaaataatctgtgcacacaacccccctgacagtcaatttacctatataacaacttgcacctgtacccttaaacctaaaataaaagcctaataaataaatacataacttaattaattttgacaatggaagagggttggcctacaccagtaagcaaaaatggaaagttgaagatgccaagctagttaatattgaggagacagaataaccttaactaatgactagtgatgctagttatttgaactttgaagctcaatgctttacttatcactcttccctttcccactacaatctccataagtgcacatgttgggaggtaaatttgtgtgctagacagtatgctattctcaaaattgccctttccttcatgtaagtactgttttaagacacttttataatgatcatgattgtcctgcttggctctgtttcctaagtagtcagatcttacccacaaagcacctcaatcattcctgagaagatgttcctgaattggcattccagtacttcatctcacttttattgatatatctgaaaaggaggggaagacagagctgaggagcaaactataacaacctgctttgaagatattgacttttcactattaaattcaatcagaatattttcttttttttttttcactaaaaataactctctgtcaagcacacttattcctattaacaatacctgttattaatctgttcctaaagcttctggtaaactttatgacttgtttaattttaacctttattatttttaaaaaaatacatttaatccttgagccaactacatataagttattagtgtcatttcctctaggtaactattgggctatgtttaaagagtctatggtgtaccaggtaatgaaaaggaacaatctttgcctgctacctttcctataattactatttagtctttattgtttaaagtcaagttgcatgaaatgttagaggcctcttgccagcatttatctacagtgattagtcagagaagagcttccgctctagcatttttcaactcagaagtctgtattctagagataagtgatagagttgagaaggtagggaaagagggattgggagggtgattaaaactggaataccaggccgggtgcggttgttcacacctgtaatcccagcactttgggaggctaaggtgggcatatcacctgaggtcaggagtttgagaccatcctgccaacatggtgaaagtctgtctcttttaaaaatacaaaaattagccaggcgtggtggcacacacctgtaatcccagctactcagggagctgaggcaggagaattgcttgaacctgggaggcggaggttgcattgagctgagatcatgccaatgcactccagcctgggtgtcaagagtgaaactccatctcaaaaaaaaataaaaaaaaaaaataattgcaataccatttgataggactctattttaatcaaacatgcaacagtggaggcatgagagtatgtcagttgacaatataaaatgaagaagtgctttgcatcaagaacgagatggactatgatgaagctttttctctattacacaaaaaaatctgtataatcttttaaatacaaaactatgcccttctttagaggattaaaacaaaactgtgcagaaaatgaactatccaatactaaaatgagaaaacatgagaattgaaacaacctcataaaatgctgtagctttcaagcccctgaaagcaataatgatactaaaaagggaaattaggcagcctttttagtttttttttgaggtcttaataaagatcttcagctacatctttgaattattgtaccccaagcttcagtttgtatcatacaatctaccatagagacattagaaggtttctgacttttcatctgattgacattgaaagccaaaacaagttttgaacagaagattccttttaaggataaccctgttgttggttaaaaattgtctttcttgggagtggtagagggaggagatcaagtttataagcaagttataaagttaagaataaatttttaataacccaaataagagaaaatggtgacttgaactaggatggtgggtgtttatgtggtgaaaaatatatcttggatatattttgcatttaaacccagggagattttctggcagatcacatgtaagagaaaaaagacagaagttaaagacgacttcaagaattattgcctgaacaaccataacaataaagttttcattcattgacatgaggaatcagtcagtgcgtactgcttctgtgcatctggtgatagcagtggatggattagtgaatttccagagtgatatatcagatatgctaagtttgagaagcctctcagatatccaaaagaagatattcagtggagagttagatacatgaatcggcagttcatggaagatgccagaattttcactttgatttttacctccacatccacataacatcatctcatcagagcaaaaattgcactggacaaagtggaacaagccagggagattttactcaaggctgttgctataagaaagagagaccagaactgaactccacaggaacaaaaggaaagaggtgttttaagagctgggatggggagggaccttaggccattattttgtgtttgcccaaggaaaagtcaactttctcatatctttatgataggaggtagtttgataacttggaatgaagtggccactgagaagaaattaaatacctaccccccacagagactgggtcatccaggtactgatatggtttggctgtgtgtccacacccaaatctcatgttgaactgcaatccccagtgttacaagaggggccctggtgagaagtgtttgaatcatgcaggtgtacttccgctttactgttctcatgatagtgagtgagttctcatgagagatttggttgtttaaaagtgtgtggcacttcccacttcactctctctctcctgccctaccatgtgaagatgtgcctgcttcccttttgccttatgccatgattgtaagttttctgcggccaccccagccatgctttctgtacagcctgcagaactgtaagtcaattaaacatcttttcttcataaattatccagtctcaggtagttccttatagcaatgcaataatggattaatacaggtactatcttcgaagtttgatgattatctttcataagaatggctcctatttccttgagaaagacattcctggcttttaaaactgtcaaaaatccttcaaaagatgtacatctcaaagtggcagagacagaatttacaatgacaagcgttctaagaaaacagaggctatttatgacaaacccacagcaatatcatactgaatgggcaaaaactggaagcattccctttgaaaatgggcacaagacagggatgccctctctcaccactcctattcaacatagtgttggaagagttctggccagggcaatcaggcaggagaaggaaataaagggtattcaattaggaaaagaggaagtcaaattgtccctgtttgcagatgacatgattgtatatctagaaaaccccatcgtctcagcccaaaatctccttaagctgataagcaacttcagcaaagtctcaggatacaaaatcaatgtgcaaaaatcacaagcattcttatacaccagtaacaaacagtgagccaaatcatgagtgaactcccattcacaattgcttcaaagagcataaaatacctaggaatccaacttacaagggatgtgaaggacctcttcaaggagcactacaaaccattgctcaatgaaataaaagaggatacaaacaaatggaagtacattccatgctcatgggtaggaagaatcaatatcgtgaaaatggccatactgcccaaggtaatttatagattcaatgccatccccatcaagctaccaatgactttcttcacagaattggaaaaaactactttaaagttcatatggaaccaaaaaagaggccgcattgccaagtcaatcctaacccaaaagaacaaagctggaggcatcacgctacctgacttcaaactcaactacaaggctacagtaaccaaaacagcatggtactggtaccaaaacagagatatagaccaatggaacagaacagagccctcagaaataatgccacacatctacaactatctgatctttgacaaacctgagaaaaaccagaaatggggaaaggattccctatttaataaatggtgctgggaaaactggctagccatatgtagaaagctgaaactggattccttccttacaccttacatgaaaattaattcaagatgggttaaagacttaaatgttagacctaaaaccataaaaaccctagaagaaaacctaggcaataccattcaggacataggcatgggcaaggacttcatgtctaaaacaccaaaagcaatggcaacaaaagccaaaattgacaaatgggatctaattaaactaaagagcttctgcacagcaaaacaaactaccatcagagtgaagaggcaacctacagaatgggagaaaatttttgcaacctactcatctgacaaagggctaatatccagaatctacaatgaactcaaacaaatttacaagaaaaaacaaacaaccccatcaaaaagtgggcaaaggatatgaacagacacttctcaaaagaagacatttatgcagccaaaaaacacatgaaaaaatgctcatcatcactggccatcagagaaatgcaaatcaaaacctcaatgagataccatctcacaccagttagaatggcgatcattaaaaagtcaggaaacaacaggtgctggagaggatgtggagaaataggaacacttttatgctgttggtgggactgtaaactagttcaaccattgtggaagtcagtgtggtgattcctcagagatctagaactagaaataccatttgacccagccatcccattactgggtatatacccaaaggattataaatcatgctgctataaagacaaatgcacacttatgtttattgcggcactattcacaatagcaaagacttggaaccaagccaaatgtccaacaatgatagactggattaagaaaatgtggcacatatacaccatggaatactatgcagccataaaaaaggatgagttcatgtcctttgtggggacatggatgaagctggaaaccatcattttcagcaaactatcgcaacgacaaaaaacaaacaccgcatgttctcactcataggtgggaattgaacaatgagaacccttggacacaggaaggggaacatcacacactggggcctgttgtggggtggggggaggggggagggatagcattgggagatatatctaatgtaaatgatgagttaatgggtgcagcacaccaacatggcacatgtatacgtatgtaacaaacctgcacgttgtgcacatgtaccctaaaacttaaagtataataaaaaataataaaaaaaaagaaaacggagaggaagctgctgtagtttggctaaggtgctgtagttaagggtgggagtcagtgataagagagaagtcagggaccaagaagcagggtaaggcctgtctataacttagtctagttcaagctcaagaaaacattgagaccattttggtcagtcttttttagggtgaccatataatttattgcttaagccaaaatactctagggatggaaaggatattattattaattaaactggataataggtgtagatcaggactttctcatcaaacccagatggatggttattccacctgtcacatcttcatgccattttcatacaacatggagtgcagcataaaggtatcatgagatgtaatatatctgtgaagataaataaaacttactttaaaaataacatctgaaacagattgccaggaaaaagtgtattgacaccaaatatttcagaaagatgtattatgaaggtaatttggcctggttcatcctttaagatccagcccaggtttcatatcctacatctgcagagttctctatgtatttctcaagcatttattttttctgctcacttgtctctcctcacagcaaaacttgagcacactgagaacatgaactttctcctttatcattgatactttaactcataactttaactcagtaagttgattaaaataacagggagggtacatagggagtcaaagttttgaacatgattttgagcttcaatgactgctagaagatttgtaaaatgaatagaaatgacactaacagaaggtgtttagcactgctgttttatgccgtatgggatttagattatactacacaggcgatggggcagggtgggaagagactaatatatttacctaatggtatcctaatgctgtttgttgcattctgctctatattttcttcctgcggaatgtgcttgtttcccattagtgcttcatgaattaaccataactgccactaatgtaattaaaatattgattgccaagaggaagtgaagattcagcattaattcattgagcaaaaacttattgagtcctattatatatcattccttgaaataggctccaggaatatatataatagcaagtcattatcttggctgcacaaacattggaatagaattgaattataaaatagtgcaaaatgtcattttatggctctaaacccacaagataaattctcttctttgactaactttgtttccaagtagtaagaactcccccagtatatcaaaaatggatctcatgtggcaggtatgtggttgctggtttagtatgctatggccatctctgaatggcgtgcccagaagccctgaaactgcccagataatttataaactcatgggtgtatcaagtgagtcaatgttgtgcctatacctattctgggagtctctcattacagaaacagtattcatctttctctgaaccatctaacacctttcacttgaccccataagttttcccttcgcaagactctatcttagcagggtgaattcattccctacctttttaatggtaaacctggcttataatattcactatacattagtcctcacttatctcccgttttgccttctgtggtttgttacccgtggtcagctgtgatgtgaaaatataaaatgaaaaattctgggaggctgggacaggagaatcatttgaacccgcgaggcggaggttgcagtgagctgagatcgcaccactatactccagcctggtgacagagcgagactccattaaaaaaaaattccagaaataaacgactcactagttttaaattctgtgccattctgagtagtttgatgaaatctcacactctgctccaccctggctggatgtaaatcatccctttgtccagaatatctgagctgtatatgctacctgcctgttggtcacctgtagccatctgcattatcagatcgactttcatggtattgcagtgcctgtgttgaagtaacccttattttactcaatagtgatctcaaaggacaagagtagtaatgctggcaatccaaacatgccaaagagaagctgtaaaatgtttcctttaagtgaaaacaataaagttcttcatttaattaataagcaaaggaataaaatgtaggatgagattgctaagctctatcataagaacaaatcttctttccactgaagtaaagaaggaaaacaaattggcgtacactacacataaagtttggtattatccatggtttcaggcatccactaggggatttggaatgtattccctgtggataagggaagactactgtagcaagtatttattgagaatatgtgatgtgacaggcactgtgataatctttgtaataagccaaccagtttggcattgttattaattttagtttacacagaggaatttcagtctctttcccaatatcaaataatctgactccagagcccacattcttaaatatgttacgtacctataaatttgctgtcatcacaggtgcccactgattattctatattatcaagcagtttaatgattctgctaggagtatccaggtgatctcaccactcttgccctccatagatacccagaaatagtctattaggttgaatatgcagcataaagccacatgcagaaaacatctttgtaacacagacagaaacaacacatggagtccgatgcctaaagattattaagaaatacaagaaagtgcaaaatacatttgagatcaaaagtactgaggcctggtattgtggagaaacagttatctaattcaaattaaatatgagtggattgttgtaggtatagagaggttgggggtgaatgtaccaactggggataaaactgaaaagttaagacaggattgtccaccatgtttgtgaatatcatgttagcctctgggcttatcgtgttgcaatgaaaacgtgtttaagttttcatgtgatgagatttgtgattttaaagggattaaggaagacttctctaatgccaatggggaggacagaaaaatcaggttgcccaacatgactgctactgaaattgcccaagcaagaaatgatgaaagctgatctagtgcagtgatggtagaaagcaagagaagcaaaggaattattcggacattcctggagtagatctatagaatttattgatttattgaatgtcagggatgcaggagagaaaactgtcaaagaggcctgcaagtccttgtgatgattccctacagtggattccttataaggacttcaagctcccatacaatctggcccctactcatctccctgatctcatcttatattccccttaccctccaactgcactgacctcattactcttcctggaatgtgtcagacaagcccctgttttagagcatttgtacttactcttccttttccctggagtacttttctccatgaactctccatgtttgaagttctcaagtcttccaggtcttactttctgagtaaggctaacattgatcacatagccacaattgtacacacacacacaaacacacacctctacccaactgggcactgcctatccacttgcctgcatagttcttttcttagctcttaacaccacttgacatgctatacatataaaaaaactatataattagtttttttctgcgttattatttttcccactctaatgcaagcttgttaagatgtgatttctgtctattttgctcactgctgcagttttggtgtctatgagagcatgtgcaaacactaatttagtttaataaattaatttctagatcagctgagtcagtgaatggtggcctcattttaaaagaatgctgttttctcaaattttgggtgacctctgacttcgttatttttattttggatgaccaaatatcacatctgtaacttaaaaacacaatcacttgcctacacacatgcgtgcctgcatgcatatgcatatacatggacacacacatacacattcacacacaaaaggcgccccctcatcttaaggttatctgttagtaccaaacatggatttttatctatagcattgaaatatgcatcattgcctttatgattttctgaagttgtattaatcacctgccttaatgttaaacctaagtagacactttgctccaccattttaaagttttaaactcagctgcaaagatctacaatttgttattattttcagtgctaaagctagaggatttttttttcaaagacgacattcaagtctacttatttacctgtcaccaactatagaactgaactgttaatcataagcactttataagcagatccaggcaactgcataagagaaaatgacacagtttaaccagactctgaaagatagatgcatattttgattcacacctgtaccaaagagaagagtcatgtccatatgacttaaggctctctagacataactgctatatgtttttatgatagacctctagaatgtgccagttttctgtatcagagaggaatcaagagaaatacttcttctaaagaactggggaggaggccgggcgcggtggctcacgcttgtaatcccagcactttgggaggccgaggcgggcggatcacgaggtcaggagatcgagaccatcctggctaacacggtgaaaccccgtctctactaaaaatacaaaaaaaattagccgggcgtgatggtgggcgcctgtagtcccagctactcgggaggctgaggcaggagaatggcgtgaacccgggaggcggagcttgcagtgagccgagattgcgccactgcactcccgcctgggccacagagcgagactccgtctcaaaaaaaaaaaaaaaaaaaaaaaaaaaaaaaaaaaaaaaaaaaagaactggggaggagagggactacagggaatagtccaagcagaataaatgcctcctcaggttttttgggcattaaaattacttcttccaataaaccatttcctacagtttatatagtgtgagctttaaaacaaaagagagaattatttccttacttgaattcttcccaaagcaatctgaacatttcataatctattccaaagcaatgcgaagagatcatcaattctctaagaatataatttccatacatgttggcctggattaaaaagaaaagaagtttatttccttaaatggcagatttgagtgctgtatgacccatatggctaaaaataaaacaaatacaaaaaaagattttactgaaagatcaaggataaaaatgaatactggctggctaatgaactcagcatctgacaataattactgacaatattaaatatgtacccaaaatataacctcaaaaaaaacaggtttgtttatcctataaataaagcagtccaaaatgttgaaaggcataatttggttaagacataatgtgaatgtgttcaaagtttatttattggggggataattatacaaaaatacttgaaataatttgccaataaagtttcagtttgtaacaataatccacatcagtttagatttgtgcatagttttataatttaaacaatttgtataaaagagctattcaatacttaatgatgtataactttcaatgaaaactaaataaaaatcacatttgaattatttacttctacattatctgattatatccatcaaatatactacatatccaagtataagagacaggtatcttctctgagaggtacaagggttgttctttatggaataccctttaagaagagtgaagccagcaatttttatatatgcatttgtgcttatatacatctagttaaaaaagcaaagatcatgtcttcatctattgttaacctaatagtaagaatgagggccaccaggcatcggtggagatctagaaggtcctgggggcacttggaaaagattattgggaataagatagagtcctggtgtaggatatgcttctgcatggtcagaatatggtgagggtaatctacaggctcctggcaaaacagtatcctgtgaaacaggtggtgctggccctggtgcttgggtaggaggaggaacaggatgtggccctggagagggatatggcatattaggggtgagataatgccctcccattcctggtagtcaagattcataagacatggatccctatggacctaaagagcagctagagctcgatctgtgggttcaccctgtagtctaggtacctttggaagggacatatatgatgtagaatatggtcttgtggggcatggcacagttggagcttaatagggaccacaggatgcagggcatgcaaatatagaggaagaaaacgatgtcctgattcctggaggcagtccgctgggaggcacagaggcatacattgctcttggcagatgatgttgcatttgggagcagtccaaatggcacagtaggtagaacatgtgggttattacaagggttggaacttggccaacccttctcaaggctggccaggttttgcattgctcacagcagaggttttggcagggagtgttcagataatgcatctgccaaaattttgtcagacattttccccagtaagatctgagctcacagcagggtttagaattgaccccagatcctagagaactgggcactgaagaatcagacgtagcctaactgatcagcagtgcgagaacaccagcatcagcagcttgcagcttcctcctctgttctgccaagttttaaagcaagctacagaagcaaagggatttaacaaaggccatggttatttccatgtgatggcaagccttctggcagagttagtacttgaatcataatgggcatgaagctaaaaactggattgactgcaggggaaataaataaaggtgccccaaaggcattatttaaatactcaatttgttttaactcctttagcaatcccaccagggagcatgacatttttagcttactggcacgtcaataatttttctaccacaaaaaagagaaaggctatctgctcaactagagataggggtatgaggagtgtcatttgtttgtattctaccactggcatgatttgagatctttgtgtaggagacatccacaagaataaacattatcccccaaccatgcatgaaatcaagccaatttgctgaagataaatttaccaaaccaaattactgaaattcagtttgccacatagtaattctgccaaaaaccaatctttctgacgaatattttgctaaatgaccaatttaacacatttgtgaaatttggttatgattttatcaaattaacacaataatttaaatgctttaacaggaacattttaagagcttaacaggaatatacaatttatgttgccactactgaaataaaactttatgaacattacaactcaaagtactcatattaaaattctaaatatgtgtatatatttctttcaaaatgcaaatggtatgttctaaaaccaaagcatcattattttatatgggaaattttcaggttcatataattaaaaaaccaaactcaactacactttattttagttttgtagttttcagggctttaggattcatctggaaattttgggtagcattttaaatttcacttgtttcatttagaaattagttgcaacaatttattatgtgatgtggttgctcctgtgactttctagtccctttctatcatggggtccattatagttatccctccagggcatccatgccttgtttccctacttggacacttttattctttgatattgaatctttcttttcacagccagcaagtcaatgtttccaattgcttcttgttaaaaaccaaacttccagcatttaataaataatgtgattctttcagctactttagatatattttagaggctttttgattttttttaactttccaagtttaaagtatgtcaggtataatgtgttatctttgggaacaaactataatattaattaagttcagtttatatttaaaattgtcattagaaagttaatagttttttccaattctgtgaagaaagtcattggtagcttgatggggatggcattgaatctataaattaccttgggcggtatggccattttcatgatatcctcatggatatccatgaggaatatcctcatgggtaggatattcctacccatgagcatggagtgttcttccatttttttatatcctcttttatttcattgagcagtggtttgtagttctccttgaagaggtccttcacatcccttgtaagttggattcctaggtattttattctctttgaagcaattgtggaatgggagttcactcatgatttgtctctctgtttgtctgtaaaaaactactttaaagttcatgtggaaccaaaaaagagcccgcatcaccaagtcaatcctaagccaaaagaacaaagctggaggcatcatgctacctgactacaaactatactacaaggctacagtaaccaaaacagcatggtactggtaccaaaacagagatatagatcaatggaacagaacagagtcctcagaaataatgccgcatatctacaactatctgatctttgacaaacctgacaaaaacaagcaatagggaaaggattccctatttaataaatggtgctaggaaaactggctagccatatgtagaaagctgaaactggatcccttccttacaccttatacaaaaattaattcaagatggattaaagacttaaacgttagacctgaaacaataaaaaccctagaagaaaacctaggcattaccattcaggacataggcatgggcaaggacttcatgtctaaaacaccaaaagcaatggcaacaaaagccaaaattgacaaatgagatctaattaaactaaagagcttctgcacagcaaaagaaactaccatcagagtgaacaggcaacctataaaatgggagaaaattttcacaacctacttatctgacaaagggctaatatgcagaatctacaatgaactcaaacaaatttacaagaaaaaaacaaacaaccccatcaaaaagtgggcgaaggacatgaacagagacttctcaaaagcagacatttatgcagccaaaaaacacatgaaaaaatgctcatcatcactggccatcagagaaatgcaaatcaaaaccacagtgagataccatctcacaccagtaagaatggcgatcattaaaaagtcaggaaacaacaggtgctggagaggatgtggagaaataggaccacttttacactgttggtgggactgtaaactagttcaaccattgtggaagtcagtgtggcgattcctcagggatctagaactagaaataccatttgacccagccatcccattactgggtatgtacccaaaggtctataaatcatgctgctatgaaggcacatgcacacgtatgtttattgcggcactattcacaatagcaaagacttggaaccaacccaaatgtccaacaatgatagactggattaagaaaatgtggcacatatacaccatggaatactatgcagctataaagaatgatgagttcatgtcctttgtagggacatggatgaaattggaaatcatcattctcagtaaactatcgcaaggacgaaaaaccaaacactgcatgttctcactcataggtgggaattgaacaatgagaacacatggacacaggaaggggaacatcacactctggggactgttgtggggtggggggatgggggagggatagcattaggagatatacctaatgctaaatgacgagttaatgggtgcagcacaccagcatggcacatgtatacatatgtaactgacctgcacattgtgcacatgtaccctaaaacttaaagtataataataataaaataaaaataaaaaaagaaaaaaaagaaagttaatatttatgaagatacatgtgtatgtatagatgtgtctctgtgtgcatgtattaaattatgtgtcaggagtgatgaaatgtatacatccttgttaaagctgtaaactgacccatcaaacctgttggaaacatttttgatatctagtatatttggtgaattttacatatttaacaactggaaattttaacatattaatcaactggaaaattgattacttaggaaagtggctttcagcacttaattttgtttgaattgacaacttatcaaatttatctccaaacttcagttatttgaatgattatggtaataggcatcccatatcaaaacatgtccatgacccttagcagataaaatttgtttgtggctagacactccattcaagctggacaaattagtgactttctgaggactctggatacttggaccatattaagaagctaatgccccatttaggccccttattgccttgggtcattcagatgtgtcccagtgtgttaatcataaatcttccttttgggtagactgattacttttgggtttcagtcactttcaaataaaacaaatgaaagaggcaagcctcagacaagtcacagcatagcccggtaatagtggtgctggtaatgataatcaggtatttttggataatccaaataatttgtagtactttttcagaaaatataacgtatcaagtattaaactagggaatgcagatataaaagtaacatctccaagatgggcaaataaatatcatacattgtttaaatgctatgacaaagatatgtgaaattttagtccaagtcagattagtaattgattcttcttactcttttgaagtggcatttctagtaacaaaccaacattttatgtatataatatacattaataattatcttttaacaataaatatctcattttattagattaaaatctgttgataaataatattattagatttcataatggggattgatatggtttggctctgtgtccccacatcaatctcatcttgaattgtaatcctcataatcctcacgtgtcaagggaggggccgaggtgggaagtgattggatcatgggggtggtttcccatatgctgtttccatgatattgagtgagtgcccatgagatccgatggttttataaggcagttttccatgcttttgcttgctgtctctttcctgccaccatgtaatgcatgcattgcttctatttcctgaggccaccctagccatgtggaactgtgagtcaattaaacctctttcctttacaatttacccagtctggggtatttctttaagcagtgcaagaatggaataataccataaattggtggctgtagagtgggttactgctataaagatacccaacaatgtggaggctactttggaaccgcataacaggcagagattgcaacagtttggagggctcagaagaagacaggaagatgtgcgaaaatttggagcttcctaggtccttgttgaatggctttgaccaaaatgctgacagtgatacggacaataaggtacaggatgtggtggcctcagagggagatgaggaactttttgggagttggagcaaaggtcactcttggctatgctttagcaaagagactggtggcattttgcccctgccctagagatctgtggatctttgaacttgagagagatgatctgaaattggaacttatatttaaaagagaagcagagcataaatgtttggaaagtttgcagcctgatgatacgacagaaaagaaaaacccattttctggagaggaaatcaagccagcacagagatttgcataagtaacaagaagccaaatgttaattaccaagacaatgggaaaaatatctccaggatatgtcagagatcttgatggcaacccctcccatcatagaaccagagggttaggtgggaaaaatggtttcctgggctgggccccactgctgtgctgtgtgccttctggacttggcacactgtggcccaggcatggctaaaaggtgccagtgtatagcttgggccatggcttcagaaggtgcaagtctcaaatcttggcagcttacatgtggtgttgggcttgcaggtgcacagaagtcaagaattgaggttagggaacctccaactagatttcagaggatgtatggagtcacctggatgtccgggcagaagtttgctgcagaggcagagccttcatgaagaacttctgctagggcagtgaggaagggaaatgtgggattggagcccccacaggggcactgcctagtggagctgtgagaagacggccactcttctccagatcccagaatggtagatccaccaagagcctgcactgcatgcctagaaaagccacagacactcaacaccagcccatgaaagcagccgagaggggggctgtaccttacaaagccataggagcagagctgcccaagatcatgggagcccacctcagcatgacttggatgtaagacatggagtcaaaggagattaattaggagctttaagatttaatgactgtctcctgtattttgggcttgcatggggcctataaactctttgttttagccaattactctcttttgaaataggagtgtttatccaatgcctttacccccattgtatctagaaagtacctaacttgcttttaattttacaggcttatatgcagaagggatttgccttgtctcagatgtgactttggactatggatttttggattaatgctggaatgagataagactttgggggactgttgaaaaggcatgattgtgtttataaatgtgaagatgtgagatttgggaggggccagggatggaatgatatggtttggctccatgtctccatgcaaatcttatcttgaattgtaatccacataatacccaagtgtggagggagggaccaagggggcagtgattggatcataggggtggtttcctctgtgctgttttcatgatagtgagttatcacaagatctcattgctttataaggcagttctccctgcttttacttgctctctccctcctgctgccttgtaaggcatgcctgcttccccttccaccatgattttatgtttcctgagcctttcctagccatgaggaactgtgagtcaattaaacctctttcctttataaattactcagtctcagatatttctttatagcagtgtggcaacaaactaatacatgagtataacataaaactttcacatattaatagtaatcaagttaaatattccacataagttagggagggaggatccttcctaagagaatttgacaattatgaataatccgtgccatagctgggtacagtggtgcactctgtagtcactgctactctggaggctgaagtgagaggatcacttgagactgggactttgaggctacagtgtgctataatgattttgcctgtgaatagtcactacactccaggaatacaagaaatatttaatcaatataccatgacacttcagttctaattctagattaaccattagctatttatataatcttttgtgagtaaactttcatcttagtttcaagtttatcacatgaaaaataggtgaattttggtccatttggcttagacctttaatggttttctataacagggacatatgctgtgcattattaatactttcatatggccagccatctcaccctactcaaaaacttacagagctttttcttttcagaagaaaatgtaatttatttaccataacagccaatatctagcatcaacattccactttctcctttgccgtgcccatccccacattctctctttgctaccaactttacctattgaaactctacctcttcaacccacaaactatttctcttagaatgacttcatgcattccaccagccaaaaaaaaagtctttcttctcagttataaattttactggtcacactctctcttaagttactgctttctgaatatatgttggatctttcgttgcaggttacgcatagtgcagagtggtacaaaccaaccaaacttaccttgagagtcagcttggggtttgaactatgattattttaattaataattaaaaccataactatgttacttaagtgttctgtatttaatatactatcaatcatataaaatatttttgcagatatttaagataatctttaataatcaacgtcatatttcaagctcaagtataatcatctagttgacaatctcaattacatgcccaaaataatacgtgtgatttacatgtgcccaaaccgtgtattagtcagccatctcttgccctttggtgtaattcctcagatagtcacccagttactcaagccaaatgactagatagtttttattagattcttcttgttctctgtgtctacccctcctacacctcttccttctcccccgcctttttttttttagaatcaagcaactctttattccataaaatagaataagttatccctctttctaatttatcagcaagcacagtctctgtagctccaaaatataactctgtctctacccttgtctgggacaccagtgtctgtcactgggcaaaatttctacttttactcctaacagtctattctctacacaatagaacactctacacagttacctttaaatatgtacattatatcacataattctttttttgaagacaatgtaataatgtttcactactctttgaaaataatccagactcttactttatcctacaatgtcttatagaacctgtgctctgtacctttcccagcccatctactgtaattcttccaactgcattccttttcagtcaccattgccatattctcatttctccaaccctccaagactcaaagcctttcaactcatgtttcttttgccaggaacactctttttcccagacttccttgacttttttgggggggttcttcatattagttatgtgtttgctaattcaaacaacttcagcaaaactttactgtactatgtgtatatatatatagtatatataatattgtgtatatatataaagtatgctctacaatatatatgccctataatatatggtttgactatataatgtccaatatatacatctaacgatcatcaatagtaagaccttgctttcatggaagaggttacggtaggaaaagtattaattaaatttcataaaggcaaacatgaaattacataatagttgcttttaaaaaggggggccctgtttggaccttcacaccaaaaatttatcatcgctacagtaatttaagcaaatgaaggaggagtcccatgtgttacatgtagaaaaagggaagggtaacaaaaaagtttcatttcatagggcattatcataaactgtatctattgatcatcatgggcattataccatatcacagcatgtatcagacacattaccaaatttaaacttttgtttatgagattttcagcacttggaatgctatgcttatcctttcatatttcaaattttttgaatacttctaaatttctaatatttttccaggttataattgatcattgtgaaatttacttgaaaactttaataatttattatccaatttattatgtaacatgcatttatttatatctttattttattaagcttttataatttattcccaaacatattctacaacgaacttttattttgcaacgtattaccagatgtaatgaagcttaaatttgttttatgtgtggctgaaatattttaagtgcttattttagtgaataaacaacataaaataaaaattcagcattgcatttagaaaaatcaccctacaatgtcatttaaatgttagaattgaaagcatgcacaggtacatttctcattttcattttaagaagtagataatttgtcattttcaaataatttgtgctacatttaaatgaatcagctattcttcaaaatccatttaaacatcttgatgttaccaattatctgaattttgggcaccagctacctataatccatgcataataaaatgttttgaggcagaatgtctgccttttgtatcatcatatatccccaatgtgtgtccatcaggtgagacaatcactaaagcctttttgaatatactttgcatttaacagcggctacagataaaggagaagaaaaaaaggaccatattgttcatttgtttgtttacaagaaaaatcttattacttgttctcttaccaaaaatgttttctttttgaaaaagtgaggaattcccgagaggcagttattaattctttccaaagaatggacgcatatacaataaagtaaatttattatgaaaataaatgcggggtgggggaaagggagggaatctgaatttatggaagagcaaacaggaatccaaagaagcatcacacagaaaataaggccaatttcaaaaattaaggaaaaaaagatcaagaaaagaaaagcttatgtgggcttgacataagaacctacagagtaccaataaattagatattagcaattattgacctataattaacttggaagtggcatgaaagagttttacatataagttgccaaatgtgatgagctttttttaaacgttggcttcagaatctactatatgtgtggatttgggcagagctagtaagtttgttgagcctcagtttcctaacctttaaaaatagaaatggtgatactattttgcattatttgtatgagaattgaatggtataatgagtacatcttggcacatatttattatatctattcaaaatagttaaaacttttaaatagtacttattatctactaggcagtattctaagcattccatgtgtgttaattccaaccccatgagagaggtactatttttagcatcattttaaacgtaaagaaactgacatacagagaaattaaagtaactggcccaaggtctcagatttttgaagcagctttgctagtgtttgagtcacagtgtcgcttttgtgttcatgaaattaaaccctatgccttgctgcttctcaaattatgttagttcccattatatttctctttgaataatttatttacagaaataattgaatggactatcactaattaattctgtatgttcaatttaaaaatcttactatttttttccatagagctccatttgagttatttccaatagatattatcttccaaaagtcccataataaggtgtacttttctctaacatcctgaagcaatggtagcataagttttctctgctggatttctgggttgaacatatagttcctgactggccttatctctatccttcctattgttcatgtgacactcacaagctgggatgtatggtatgaaaattagatgtctgtaatcccagcactttgcgaacccaaggcagagagattatttgagtccaggagttagagactgtagtgtgccatgattgtgtctataaatggccactgtactcaggaagaccccatctaaaaaataataattataagtaaataaattaaataaaacagaaaaaagaaaataattgaactatgacataagcaacatatgcggatgattctgcttatttttgattttatatagcattattttattatttattcatatattaaacaagtactttatccataaatactacaaacgtacaaatctacaaaatctacaaatattaaagagggctagtttctttctttctttctttctttctttctttctttctttctttctttctttctttctctctcttctttctttctttttcttttctttctttatttctgatttttctccattaagaagatatttctaagctgaatagagttccaatttctgaggatatggacaatagagtactggtcttaactttacatctttatagaaactaagaacagcttgtttattatttgtttgtgtgtattataagcatggccagaggcttatccttaccaattagtagctgcagtgtatccaggcatacagattgtagaaaaataaataaataaataaataaataaacacagtgaaagcttttgtgctgacagacttggagtacatccctactatgctactatgctgttttcatttcccattgttgtagttcaaatcagcacatatattttgagtgcaaatatcaatgactggcaaaataggcctaactagcgaagtggcagttagcaagtgtaagaagatatcaagcaacattaatatttcaacaaacacactggaacattaccatgtctaaggcatcaatctaggtatgagttaaggtcttggttccaaggatcttccattctaggagaagagtaaaattagggatccttaacaatcaaataaattgaataaatatagatagtaatatgtgctctcaagacaacataacaggccaaagaaatagaaagtgatgattatgtagttaggcatggcattacacataagatttccagtgtcgcacatgatctgcaagttatgtttggttgcattttctacttttccttcccacccacctcttctcttatctccacccacagggctcctttctatccctcaaacatgccaggtatctcctcaattagggttgtgcactgactgtccccttttcttggaagtcttctcactcatatttgatatgaggacgaagctctgaatttttatcttgcccgaatttctacccaaagaatctagggattcatgttccacaagccataaattatcatcagatgggttttatttaaccctatatattgcgacttacttttcaatctgactctggcataacattatgagacaaggaaaaaaaaaatatttaaccccaaaatatatttccttgccataccttgaaattgccctgcaaagtctcttgtgggaaaaattcacattctatagtgaattcccttccccttttgttttccttaacttcatttccagatccgagagatattcaactaagatccaggcacccttttaggtcccataagaaaaaaaaaatacacagcctgctccctctgaagtctgctatgtgagagattcctctgcacaataaaacttgttctctgaaatcctttatcttaacctgaatgttcctttccattgatcccaggtcttcagataaactcaaccaaatgtcaactggaaaatgtttaaatttacctatagcctggaagccccatgctttgagttgtcccacctttctaaaccaaaccaatgtatttcttaaatgtatttgatcgacgtctcatgtctgcctgccactgaccaccttgggtacatgttctcaggacctcctgagggctgtttcacaggccatggtcactcatatttgattcagaatgaatctcttcaaaatattttactgagtttgactcttttcactgacagatactccctcacatccatatctttccttatgtgtcatcttcccaacaagctccattctaaccaccatttatatttcagttactcttatctcccttactgtgatttatttttctatttgtttttaaatcacctatcactttctaaaatctcatgttttattttattttattttattttgggtgcttattgtttatttttgtgtctgccttgtagaatataagctagatgaaggcaaaaatacttgtctattttatttatgagtgtatttcaaatgcttataatggtacctggcctatgtaggctttcagttagctacaggaggtaaaaatgaccacttaataatcataaaaagaaatgaattccaaaaacaaaagtggatagaccatggtactgggattgagaaatgagacagttatggccaaagtatagttttgcttagagttaaatgagaatcttttgtagaatgaaagggcaaaatggagaacatacttaaaggtgcttggaatgaagaataaagtgagttttggaaaatgggtatggagatggaacagatgcagagaggacccattactgtactaccaaagaagagaattctatgttcctttactttgcacagcaaaaattgtatttgtctgctgaatacagaacatgcagaatggtttgaaaaagtatgtaactaggtcaaggagtaataaaacggtaatggcacaaccaggcaatttattttggaaagtactggagtttaatccatcatattttatagtgtaattggaattatattaaggaacctgaacatcctcctgcaaaacatttagagttaactgttttaaggagtagattcttgtgacaaaagttcactggtaggagttcatccattcatctacacattcactcattaattcatctaaaatatacatttaggatctgatgtattacttaatgctgtgctagactctggatacaaaaataagtatcacacaggccctatactaacagggctcatattcatttgtgggatgtataaaaagcaatttcaatgtaatatacaatcatataggaagttctttaaaagtatagacagtagaaatattttgttgttgttttagatggaatcttataataggtggtgataattaaccttgatattagaattttaaatctcaccttaagtgaaaaatagatttatgtagaaagaatagcatgtaaaagtaaattaaggtgtgagagtgtatgacatatttcagaacaagtaatccatctgttattagtctgttctcatcctgctaatagagacataactgagactgggttatttatcaaggaaagaggtttaattgactcacagttccacatagctggggaggcctcacactcagggcagaaggcaaaggaggagccaagtcatctcttacatggcgacaggcaagagagcatgtgcaggggaactcccatttataaaaccatcaaatctcatgagacttattcagtatccatgagaacagcatgagaaagacctgcccccatgattcaatgacatcccactgggtccctcacatgacacgtgggaattatgggagctacaattcgagatttggatgcggacacagccaaaccatatcaccatcacattagggcaaaaacacaagaggtgttgcagattgaattgtgtcctcctgaaaagatgtattagacttctaactaacccagttacttcagaatgtgcttttatttggagacagattctttccatagataaccaaataaaaatgagatttggatggaacctaatccaatacgactggtgtccttattcaaaaggaattttgcacacagacatattcacagggagaatgccatatggagatgaaggcagatcgtagtgctgcctttacaagtcaaagaacaccaccaaagattgttggtaaatcaccagaagttaggagaaaggcatggaaaaggttctcctccacagtactcagcagggaggggaaaaaacccctgcagacaccttgatttcagatatccagcctccagaactgtgaaacaacaacaacaacaacaacaacaaatcctgttgtttaagttactcagtttgtggtatttcttacagcagtcctagagctaatacaggagaaggtgaaagttataaaagacaaagatgcaaagatacggagggactatcaacattgttaaaatattaaatgcttaaattttagtggtttgtaaaagccactgaaaatggaaaccaaatgatgagttgtgcattttacaaagaaattctggcagcctgggaaagatgcatataagctaaagctagttaagatgaaaagtcagaaaactaggcaaatgactattataatttagcaagagggagccaatgaggcactaaaatagggaagaatagttagattgaagatgtagtgatgtaagagattaaggatataaaatatgtaaatataaatattgatgagataggaaagggaaatcaatggggagattagatatgactttggcttagggaaatgagaaaatgatggcaccaagtttatagaaaggcaattcgtggtctaaggtagaggacgaaaatgaattttacttaatgttgcaatcaatgtacatggagaacgtttgccagcttacaaatgagcctgtgggtattttaggtgagttatgaactagataaaaaaagagaaaaataaaagtttataaataatatttattgtgtaatatgaaggattgaagaaagaggatatagactaaaggttgtatgtacctgagaggtggggatacgggcaagggcatgagggagagttacttctgggattcttatagtagttcaggcatgagttgataagcttcaggtaactaaatacaagcaacaatgactctatgcaataaaataaggttatttttatctaaaatgcaagctatgctagaagcagtacagaagaataactgctttaatagtagatctcacctggccatgaccttctaagcaataagttttatttatattttcaagccgtgtttactatgtaaataaatataaaaatgcgaagaagaattagcttccatatttttttctaatgtgaaggtatgaactctttctgtaaatttttattgatacgcataaagataaaaaagctgtctaaaagatcttacgttacgcagagtaagatgcaaagttgagaaatacttgacccataccaccggctgttccaatgtgatacagcagacaaaacaatgaaccagagtgctacaagagaagtactattggtgtactgccctgcagaaaaaatcgaaaaaacaaaaaacagaaactaaagcaaaaccaataaatatttttgtagaatttgtgcttaatttatgctcagaaatattattgatttatgcttttgactgatatttaagtttcattataatcacaagaatcttactag
